United States Patent Application Publication US 2025/0017953 A1 - sequence listing, part 2

SEQ ID NO: 2832 - RNA, 21 nt, synthetic construct
  misc_feature 1..21: note = Description of Artificial Sequence: Synthetic oligonucleotide
  source 1..21: mol_type = other RNA
  modified_base 1: mod_base = OTHER; note = 2'-O-methyluridine-3'-phosphorothioate
  modified_base 2: mod_base = OTHER; note = 2'-O-methylguanosine-3'- phosphorothioate
  modified_base 3: mod_base = OTHER; note = 2'-O-methylguanosine-3'-phosphate
  modified_base 4: mod_base = OTHER; note = 2'-O-methyladenosine-3'-phosphate
  modified_base 5: mod_base = OTHER; note = 2'-O-methylcytidine-3'-phosphate
  modified_base 6: mod_base = OTHER; note = 2'-O-methylguanosine-3'-phosphate
  modified_base 7: mod_base = OTHER; note = 2'-fluoroguanosine-3'-phosphate
  modified_base 8: mod_base = OTHER; note = 2'-O-methylcytidine-3'-phosphate
  modified_base 9: mod_base = OTHER; note = 2'-fluoroguanosine-3'-phosphate
  modified_base 10: mod_base = OTHER; note = 2'-fluoroadenosine-3'-phosphate
  modified_base 11: mod_base = OTHER; note = 2'-fluoroguanosine-3'-phosphate
  modified_base 12: mod_base = OTHER; note = 2'-O-methylcytidine-3'-phosphate
  modified_base 13: mod_base = OTHER; note = 2'-O-methyluridine-3'-phosphate
  modified_base 14: mod_base = OTHER; note = 2'-O-methyluridine-3'-phosphate
  modified_base 15: mod_base = OTHER; note = 2'-O-methylguanosine-3'-phosphate
  modified_base 16: mod_base = OTHER; note = 2'-O-methylcytidine-3'-phosphate
  modified_base 17: mod_base = OTHER; note = 2'-O-methylcytidine-3'-phosphate
  modified_base 18: mod_base = OTHER; note = 2'-O-methyladenosine-3'-phosphate
  modified_base 19: mod_base = OTHER; note = 2'-O-methylcytidine-3'-phosphate
  modified_base 20: mod_base = OTHER; note = 2'-O-methyluridine-3'-phosphate
  modified_base 21: mod_base = OTHER; note = 2'-O-methylguanosine-3'-phosphate attached to N-[tris(N-acetylgalactosamine-alkyl)-amidodecanoyl)]-4-hydr oxyprolinol Hyp-(N-acetylgalactosamine-alkyl)3
tggacggcgagcttgccactg

SEQ ID NO: 2833 - RNA, 23 nt, synthetic construct
  misc_feature 1..23: note = Description of Artificial Sequence: Synthetic oligonucleotide
  source 1..23: mol_type = other RNA
  modified_base 1: mod_base = OTHER; note = 2'-O-methylcytidine-3'- phosphorothioate
  modified_base 2: mod_base = OTHER; note = 2'-fluoroadenosine-3'-phosphorothioate
  modified_base 3: mod_base = OTHER; note = 2'-O-methylguanosine-3'-phosphate
  modified_base 4: mod_base = OTHER; note = 2'-O-methyluridine-3'-phosphate
  modified_base 5: mod_base = OTHER; note = 2'-O-methylguanosine-3'-phosphate
  modified_base 6: mod_base = OTHER; note = 2'-fluoroguanosine-3'-phosphate
  modified_base 7: mod_base = OTHER; note = 2'-O-methylcytidine-3'-phosphate
  modified_base 8: mod_base = OTHER; note = 2'-fluoroadenosine-3'-phosphate
  modified_base 9: mod_base = OTHER; note = 2'-fluoroadenosine-3'-phosphate
  modified_base 10: mod_base = OTHER; note = 2'-O-methylguanosine-3'-phosphate
  modified_base 11: mod_base = OTHER; note = 2'-O-methylcytidine-3'-phosphate
  modified_base 12: mod_base = OTHER; note = 2'-O-methyluridine-3'-phosphate
  modified_base 13: mod_base = OTHER; note = 2'-O-methylcytidine-3'-phosphate
  modified_base 14: mod_base = OTHER; note = 2'-fluoroguanosine-3'-phosphate
  modified_base 15: mod_base = OTHER; note = 2'-O-methylcytidine-3'-phosphate
  modified_base 16: mod_base = OTHER; note = 2'-fluorocytidine-3'-phosphate
  modified_base 17: mod_base = OTHER; note = 2'-O-methylguanosine-3'-phosphate
  modified_base 18: mod_base = OTHER; note = 2'-O-methyluridine-3'-phosphate
  modified_base 19: mod_base = OTHER; note = 2'-O-methylcytidine-3'-phosphate
  modified_base 20: mod_base = OTHER; note = 2'-O-methylcytidine-3'-phosphate
  modified_base 21: mod_base = OTHER; note = 2'-O-methyladenosine-3'- phosphorothioate
  modified_base 22: mod_base = OTHER; note = 2'-O-methylcytidine-3'- phosphorothioate
  modified_base 23: mod_base = OTHER; note = 2'-O-methyladenosine-3'-phosphate
cagtggcaagctcgccgtccaca

SEQ ID NO: 2834 - RNA, 21 nt, synthetic construct
  misc_feature 1..21: note = Description of Artificial Sequence: Synthetic oligonucleotide
  source 1..21: mol_type = other RNA
  modified_base 1: mod_base = OTHER; note = 2'-O-methyladenosine-3'- phosphorothioate
  modified_base 2: mod_base = OTHER; note = 2'-O-methyluridine-3'-phosphorothioate
  modified_base 3: mod_base = OTHER; note = 2'-O-methylguanosine-3'-phosphate
  modified_base 4: mod_base = OTHER; note = 2'-O-methyluridine-3'-phosphate
  modified_base 5: mod_base = OTHER; note = 2'-O-methylguanosine-3'-phosphate
  modified_base 6: mod_base = OTHER; note = 2'-O-methylcytidine-3'-phosphate
  modified_base 7: mod_base = OTHER; note = 2'-fluoroguanosine-3'-phosphate
  modified_base 8: mod_base = OTHER; note = 2'-O-methyluridine-3'-phosphate
  modified_base 9: mod_base = OTHER; note = 2'-fluoroadenosine-3'-phosphate
  modified_base 10: mod_base = OTHER; note = 2'-fluoroadenosine-3'-phosphate
  modified_base 11: mod_base = OTHER; note = 2'-fluorocytidine-3'-phosphate
  modified_base 12: mod_base = OTHER; note = 2'-O-methyladenosine-3'-phosphate
  modified_base 13: mod_base = OTHER; note = 2'-O-methylguanosine-3'-phosphate
  modified_base 14: mod_base = OTHER; note = 2'-O-methyladenosine-3'-phosphate
  modified_base 15: mod_base = OTHER; note = 2'-O-methyluridine-3'-phosphate
  modified_base 16: mod_base = OTHER; note = 2'-O-methyluridine-3'-phosphate
  modified_base 17: mod_base = OTHER; note = 2'-O-methylcytidine-3'-phosphate
  modified_base 18: mod_base = OTHER; note = 2'-O-methyladenosine-3'-phosphate
  modified_base 19: mod_base = OTHER; note = 2'-O-methyladenosine-3'-phosphate
  modified_base 20: mod_base = OTHER; note = 2'-O-methyladenosine-3'-phosphate
  modified_base 21: mod_base = OTHER; note = 2'-O-methylcytidine-3'-phosphate attached to N-[tris(N-acetylgalactosamine-alkyl)-amidodecanoyl)]-4-hydr oxyprolinol Hyp-(N-acetylgalactosamine-alkyl)3
atgtgcgtaacagattcaaac

SEQ ID NO: 2835 - RNA, 23 nt, synthetic construct
  misc_feature 1..23: note = Description of Artificial Sequence: Synthetic oligonucleotide
  source 1..23: mol_type = other RNA
  modified_base 1: mod_base = OTHER; note = 2'-O-methylguanosine-3'- phosphorothioate
  modified_base 2: mod_base = OTHER; note = 2'-fluorouridine -3'-phosphorothioate
  modified_base 3: mod_base = OTHER; note = 2'-O-methyluridine-3'-phosphate
  modified_base 4: mod_base = OTHER; note = 2'-O-methyluridine-3'-phosphate
  modified_base 5: mod_base = OTHER; note = 2'-O-methylguanosine-3'-phosphate
  modified_base 6: mod_base = OTHER; note = 2'-fluoroadenosine-3'-phosphate
  modified_base 7: mod_base = OTHER; note = 2'-O-methyladenosine-3'-phosphate
  modified_base 8: mod_base = OTHER; note = 2'-fluorouridine-3'-phosphate
  modified_base 9: mod_base = OTHER; note = 2'-fluorocytidine-3'-phosphate
  modified_base 10: mod_base = OTHER; note = 2'-O-methyluridine-3'-phosphate
  modified_base 11: mod_base = OTHER; note = 2'-O-methylguanosine-3'-phosphate
  modified_base 12: mod_base = OTHER; note = 2'-O-methyluridine-3'-phosphate
  modified_base 13: mod_base = OTHER; note = 2'-O-methyluridine-3'-phosphate
  modified_base 14: mod_base = OTHER; note = 2'-fluoroadenosine-3'-phosphate
  modified_base 15: mod_base = OTHER; note = 2'-O-methylcytidine-3'-phosphate
  modified_base 16: mod_base = OTHER; note = 2'-fluoroguanosine-3'-phosphate
  modified_base 17: mod_base = OTHER; note = 2'-O-methylcytidine-3'-phosphate
  modified_base 18: mod_base = OTHER; note = 2'-O-methyladenosine-3'-phosphate
  modified_base 19: mod_base = OTHER; note = 2'-O-methylcytidine-3'-phosphate
  modified_base 20: mod_base = OTHER; note = 2'-O-methyladenosine-3'-phosphate
  modified_base 21: mod_base = OTHER; note = 2'-O-methyluridine-3'-phosphorothioate
  modified_base 22: mod_base = OTHER; note = 2'-O-methylcytidine-3'- phosphorothioate
  modified_base 23: mod_base = OTHER; note = 2'-O-methyladenosine-3'-phosphate
gtttgaatctgttacgcacatca

SEQ ID NO: 2836 - RNA, 21 nt, synthetic construct
  misc_feature 1..21: note = Description of Artificial Sequence: Synthetic oligonucleotide
  source 1..21: mol_type = other RNA
  modified_base 1: mod_base = OTHER; note = 2'-O-methyluridine-3'-phosphorothioate
  modified_base 2: mod_base = OTHER; note = 2'-O-methylguanosine-3'- phosphorothioate
  modified_base 3: mod_base = OTHER; note = 2'-O-methyluridine-3'-phosphate
  modified_base 4: mod_base = OTHER; note = 2'-O-methylguanosine-3'-phosphate
  modified_base 5: mod_base = OTHER; note = 2'-O-methylcytidine-3'-phosphate
  modified_base 6: mod_base = OTHER; note = 2'-O-methylguanosine-3'-phosphate
  modified_base 7: mod_base = OTHER; note = 2'-fluorouridine-3'-phosphate
  modified_base 8: mod_base = OTHER; note = 2'-O-methyladenosine-3'-phosphate
  modified_base 9: mod_base = OTHER; note = 2'-fluoroadenosine-3'-phosphate
  modified_base 10: mod_base = OTHER; note = 2'-fluorocytidine-3'-phosphate
  modified_base 11: mod_base = OTHER; note = 2'-fluoroadenosine-3'-phosphate
  modified_base 12: mod_base = OTHER; note = 2'-O-methylguanosine-3'-phosphate
  modified_base 13: mod_base = OTHER; note = 2'-O-methyladenosine-3'-phosphate
  modified_base 14: mod_base = OTHER; note = 2'-O-methyluridine-3'-phosphate
  modified_base 15: mod_base = OTHER; note = 2'-O-methyluridine-3'-phosphate
  modified_base 16: mod_base = OTHER; note = 2'-O-methylcytidine-3'-phosphate
  modified_base 17: mod_base = OTHER; note = 2'-O-methyladenosine-3'-phosphate
  modified_base 18: mod_base = OTHER; note = 2'-O-methyladenosine-3'-phosphate
  modified_base 19: mod_base = OTHER; note = 2'-O-methyladenosine-3'-phosphate
  modified_base 20: mod_base = OTHER; note = 2'-O-methylcytidine-3'-phosphate
  modified_base 21: mod_base = OTHER; note = 2'-O-methyluridine-3'-phosphate attached to N-[tris(N-acetylgalactosamine-alkyl)-amidodecanoyl)]-4-hydr oxyprolinol Hyp-(N-acetylgalactosamine-alkyl)3
tgtgcgtaacagattcaaact

SEQ ID NO: 2837 - RNA, 23 nt, synthetic construct
  misc_feature 1..23: note = Description of Artificial Sequence: Synthetic oligonucleotide
  source 1..23: mol_type = other RNA
  modified_base 1: mod_base = OTHER; note = 2'-O-methyladenosine-3'- phosphorothioate
  modified_base 2: mod_base = OTHER; note = 2'-fluoroguanosine-3'-phosphorothioate
  modified_base 3: mod_base = OTHER; note = 2'-O-methyluridine-3'-phosphate
  modified_base 4: mod_base = OTHER; note = 2'-O-methyluridine-3'-phosphate
  modified_base 5: mod_base = OTHER; note = 2'-O-methyluridine-3'-phosphate
  modified_base 6: mod_base = OTHER; note = 2'-fluoroguanosine-3'-phosphate
  modified_base 7: mod_base = OTHER; note = 2'-O-methyladenosine-3'-phosphate
  modified_base 8: mod_base = OTHER; note = 2'-fluoroadenosine-3'-phosphate
  modified_base 9: mod_base = OTHER; note = 2'-fluorouridine-3'-phosphate
  modified_base 10: mod_base = OTHER; note = 2'-O-methylcytidine-3'-phosphate
  modified_base 11: mod_base = OTHER; note = 2'-O-methyluridine-3'-phosphate
  modified_base 12: mod_base = OTHER; note = 2'-O-methylguanosine-3'-phosphate
  modified_base 13: mod_base = OTHER; note = 2'-O-methyluridine-3'-phosphate
  modified_base 14: mod_base = OTHER; note = 2'-fluorouridine-3'-phosphate
  modified_base 15: mod_base = OTHER; note = 2'-O-methyladenosine-3'-phosphate
  modified_base 16: mod_base = OTHER; note = 2'-fluorocytidine-3'-phosphate
  modified_base 17: mod_base = OTHER; note = 2'-O-methylguanosine-3'-phosphate
  modified_base 18: mod_base = OTHER; note = 2'-O-methylcytidine-3'-phosphate
  modified_base 19: mod_base = OTHER; note = 2'-O-methyladenosine-3'-phosphate
  modified_base 20: mod_base = OTHER; note = 2'-O-methylcytidine-3'-phosphate
  modified_base 21: mod_base = OTHER; note = 2'-O-methyladenosine-3'- phosphorothioate
  modified_base 22: mod_base = OTHER; note = 2'-O-methyluridine-3'-phosphorothioate
  modified_base 23: mod_base = OTHER; note = 2'-O-methylcytidine-3'-phosphate
agtttgaatctgttacgcacatc

SEQ ID NO: 2838 - RNA, 21 nt, synthetic construct
  misc_feature 1..21: note = Description of Artificial Sequence: Synthetic oligonucleotide
  source 1..21: mol_type = other RNA
  modified_base 1: mod_base = OTHER; note = 2'-O-methylguanosine-3'- phosphorothioate
  modified_base 2: mod_base = OTHER; note = 2'-O-methyladenosine-3'- phosphorothioate
  modified_base 3: mod_base = OTHER; note = 2'-O-methyluridine-3'-phosphate
  modified_base 4: mod_base = OTHER; note = 2'-O-methylguanosine-3'-phosphate
  modified_base 5: mod_base = OTHER; note = 2'-O-methyladenosine-3'-phosphate
  modified_base 6: mod_base = OTHER; note = 2'-O-methyluridine-3'-phosphate
  modified_base 7: mod_base = OTHER; note = 2'-fluoroguanosine-3'-phosphate
  modified_base 8: mod_base = OTHER; note = 2'-O-methyluridine-3'-phosphate
  modified_base 9: mod_base = OTHER; note = 2'-fluoroguanosine-3'-phosphate
  modified_base 10: mod_base = OTHER; note = 2'-fluorocytidine-3'-phosphate
  modified_base 11: mod_base = OTHER; note = 2'-fluoroguanosine-3'-phosphate
  modified_base 12: mod_base = OTHER; note = 2'-O-methyluridine-3'-phosphate
  modified_base 13: mod_base = OTHER; note = 2'-O-methyladenosine-3'-phosphate
  modified_base 14: mod_base = OTHER; note = 2'-O-methyladenosine-3'-phosphate
  modified_base 15: mod_base = OTHER; note = 2'-O-methylcytidine-3'-phosphate
  modified_base 16: mod_base = OTHER; note = 2'-O-methyladenosine-3'-phosphate
  modified_base 17: mod_base = OTHER; note = 2'-O-methylguanosine-3'-phosphate
  modified_base 18: mod_base = OTHER; note = 2'-O-methyladenosine-3'-phosphate
  modified_base 19: mod_base = OTHER; note = 2'-O-methyluridine-3'-phosphate
  modified_base 20: mod_base = OTHER; note = 2'-O-methyluridine-3'-phosphate
  modified_base 21: mod_base = OTHER; note = 2'-O-methylcytidine-3'-phosphate attached to N-[tris(N-acetylgalactosamine-alkyl)-amidodecanoyl)]-4-hydr oxyprolinol Hyp-(N-acetylgalactosamine-alkyl)3
gatgatgtgcgtaacagattc

SEQ ID NO: 2839 - RNA, 23 nt, synthetic construct
  misc_feature 1..23: note = Description of Artificial Sequence: Synthetic oligonucleotide
  source 1..23: mol_type = other RNA
  modified_base 1: mod_base = OTHER; note = 2'-O-methylguanosine-3'- phosphorothioate
  modified_base 2: mod_base = OTHER; note = 2'-fluoroadenosine-3'-phosphorothioate
  modified_base 3: mod_base = OTHER; note = 2'-O-methyladenosine-3'-phosphate
  modified_base 4: mod_base = OTHER; note = 2'-O-methyluridine-3'-phosphate
  modified_base 5: mod_base = OTHER; note = 2'-O-methylcytidine-3'-phosphate
  modified_base 6: mod_base = OTHER; note = 2'-fluorouridine-3'-phosphate
  modified_base 7: mod_base = OTHER; note = 2'-O-methylguanosine-3'-phosphate
  modified_base 8: mod_base = OTHER; note = 2'-fluorouridine-3'-phosphate
  modified_base 9: mod_base = OTHER; note = 2'-fluorouridine-3'-phosphate
  modified_base 10: mod_base = OTHER; note = 2'-O-methyladenosine-3'-phosphate
  modified_base 11: mod_base = OTHER; note = 2'-O-methylcytidine-3'-phosphate
  modified_base 12: mod_base = OTHER; note = 2'-O-methylguanosine-3'-phosphate
  modified_base 13: mod_base = OTHER; note = 2'-O-methylcytidine-3'-phosphate
  modified_base 14: mod_base = OTHER; note = 2'-fluoroadenosine-3'-phosphate
  modified_base 15: mod_base = OTHER; note = 2'-O-methylcytidine-3'-phosphate
  modified_base 16: mod_base = OTHER; note = 2'-fluoroadenosine-3'-phosphate
  modified_base 17: mod_base = OTHER; note = 2'-O-methyluridine-3'-phosphate
  modified_base 18: mod_base = OTHER; note = 2'-O-methylcytidine-3'-phosphate
  modified_base 19: mod_base = OTHER; note = 2'-O-methyladenosine-3'-phosphate
  modified_base 20: mod_base = OTHER; note = 2'-O-methyluridine-3'-phosphate
  modified_base 21: mod_base = OTHER; note = 2'-O-methylcytidine-3'- phosphorothioate
  modified_base 22: mod_base = OTHER; note = 2'-O-methylcytidine-3'- phosphorothioate
  modified_base 23: mod_base = OTHER; note = 2'-O-methyladenosine-3'-phosphate
gaatctgttacgcacatcatcca

SEQ ID NO: 2840 - RNA, 21 nt, synthetic construct
  misc_feature 1..21: note = Description of Artificial Sequence: Synthetic oligonucleotide
  source 1..21: mol_type = other RNA
  modified_base 1: mod_base = OTHER; note = 2'-O-methylguanosine-3'- phosphorothioate
  modified_base 2: mod_base = OTHER; note = 2'-O-methylguanosine-3'- phosphorothioate
  modified_base 3: mod_base = OTHER; note = 2'-O-methyladenosine-3'-phosphate
  modified_base 4: mod_base = OTHER; note = 2'-O-methyluridine-3'-phosphate
  modified_base 5: mod_base = OTHER; note = 2'-O-methylguanosine-3'-phosphate
  modified_base 6: mod_base = OTHER; note = 2'-O-methyladenosine-3'-phosphate
  modified_base 7: mod_base = OTHER; note = 2'-fluorouridine-3'-phosphate
  modified_base 8: mod_base = OTHER; note = 2'-O-methylguanosine-3'-phosphate
  modified_base 9: mod_base = OTHER; note = 2'-fluorouridine-3'-phosphate
  modified_base 10: mod_base = OTHER; note = 2'-fluoroguanosine-3'-phosphate
  modified_base 11: mod_base = OTHER; note = 2'-fluorocytidine-3'-phosphate
  modified_base 12: mod_base = OTHER; note = 2'-O-methylguanosine-3'-phosphate
  modified_base 13: mod_base = OTHER; note = 2'-O-methyluridine-3'-phosphate
  modified_base 14: mod_base = OTHER; note = 2'-O-methyladenosine-3'-phosphate
  modified_base 15: mod_base = OTHER; note = 2'-O-methyladenosine-3'-phosphate
  modified_base 16: mod_base = OTHER; note = 2'-O-methylcytidine-3'-phosphate
  modified_base 17: mod_base = OTHER; note = 2'-O-methyladenosine-3'-phosphate
  modified_base 18: mod_base = OTHER; note = 2'-O-methylguanosine-3'-phosphate
  modified_base 19: mod_base = OTHER; note = 2'-O-methyladenosine-3'-phosphate
  modified_base 20: mod_base = OTHER; note = 2'-O-methyluridine-3'-phosphate
  modified_base 21: mod_base = OTHER; note = 2'-O-methyluridine-3'-phosphate attached to N-[tris(N-acetylgalactosamine-alkyl)-amidodecanoyl)]-4-hydr oxyprolinol Hyp-(N-acetylgalactosamine-alkyl)3
ggatgatgtgcgtaacagatt

SEQ ID NO: 2841 - RNA, 23 nt, synthetic construct
  misc_feature 1..23: note = Description of Artificial Sequence: Synthetic oligonucleotide
  source 1..23: mol_type = other RNA
  modified_base 1: mod_base = OTHER; note = 2'-O-methyladenosine-3'- phosphorothioate
  modified_base 2: mod_base = OTHER; note = 2'-fluoroadenosine-3'-phosphorothioate
  modified_base 3: mod_base = OTHER; note = 2'-O-methyluridine-3'-phosphate
  modified_base 4: mod_base = OTHER; note = 2'-O-methylcytidine-3'-phosphate
  modified_base 5: mod_base = OTHER; note = 2'-O-methyluridine-3'-phosphate
  modified_base 6: mod_base = OTHER; note = 2'-fluoroguanosine-3'-phosphate
  modified_base 7: mod_base = OTHER; note = 2'-O-methyluridine-3'-phosphate
  modified_base 8: mod_base = OTHER; note = 2'-fluorouridine-3'-phosphate
  modified_base 9: mod_base = OTHER; note = 2'-fluoroadenosine-3'-phosphate
  modified_base 10: mod_base = OTHER; note = 2'-O-methylcytidine-3'-phosphate
  modified_base 11: mod_base = OTHER; note = 2'-O-methylguanosine-3'-phosphate
  modified_base 12: mod_base = OTHER; note = 2'-O-methylcytidine-3'-phosphate
  modified_base 13: mod_base = OTHER; note = 2'-O-methyladenosine-3'-phosphate
  modified_base 14: mod_base = OTHER; note = 2'-fluorocytidine-3'-phosphate
  modified_base 15: mod_base = OTHER; note = 2'-O-methyladenosine-3'-phosphate
  modified_base 16: mod_base = OTHER; note = 2'-fluorouridine-3'-phosphate
  modified_base 17: mod_base = OTHER; note = 2'-O-methylcytidine-3'-phosphate
  modified_base 18: mod_base = OTHER; note = 2'-O-methyladenosine-3'-phosphate
  modified_base 19: mod_base = OTHER; note = 2'-O-methyluridine-3'-phosphate
  modified_base 20: mod_base = OTHER; note = 2'-O-methylcytidine-3'-phosphate
  modified_base 21: mod_base = OTHER; note = 2'-O-methylcytidine-3'- phosphorothioate
  modified_base 22: mod_base = OTHER; note = 2'-O-methyladenosine-3'- phosphorothioate
  modified_base 23: mod_base = OTHER; note = 2'-O-methylguanosine-3'-phosphate
aatctgttacgcacatcatccag

SEQ ID NO: 2842 - RNA, 21 nt, synthetic construct
  misc_feature 1..21: note = Description of Artificial Sequence: Synthetic oligonucleotide
  source 1..21: mol_type = other RNA
  modified_base 1: mod_base = OTHER; note = 2'-O-methylguanosine-3'- phosphorothioate
  modified_base 2: mod_base = OTHER; note = 2'-O-methylguanosine-3'- phosphorothioate
  modified_base 3: mod_base = OTHER; note = 2'-O-methylguanosine-3'-phosphate
  modified_base 4: mod_base = OTHER; note = 2'-O-methyluridine-3'-phosphate
  modified_base 5: mod_base = OTHER; note = 2'-O-methylcytidine-3'-phosphate
  modified_base 6: mod_base = OTHER; note = 2'-O-methyladenosine-3'-phosphate
  modified_base 7: mod_base = OTHER; note = 2'-fluoroguanosine-3'-phosphate
  modified_base 8: mod_base = OTHER; note = 2'-O-methylcytidine-3'-phosphate
  modified_base 9: mod_base = OTHER; note = 2'-fluoroadenosine-3'-phosphate
  modified_base 10: mod_base = OTHER; note = 2'-fluorouridine-3'-phosphate
  modified_base 11: mod_base = OTHER; note = 2'-fluoroguanosine-3'-phosphate
  modified_base 12: mod_base = OTHER; note = 2'-O-methylcytidine-3'-phosphate
  modified_base 13: mod_base = OTHER; note = 2'-O-methylcytidine-3'-phosphate
  modified_base 14: mod_base = OTHER; note = 2'-O-methyladenosine-3'-phosphate
  modified_base 15: mod_base = OTHER; note = 2'-O-methyladenosine-3'-phosphate
  modified_base 16: mod_base = OTHER; note = 2'-O-methyluridine-3'-phosphate
  modified_base 17: mod_base = OTHER; note = 2'-O-methyladenosine-3'-phosphate
  modified_base 18: mod_base = OTHER; note = 2'-O-methyluridine-3'-phosphate
  modified_base 19: mod_base = OTHER; note = 2'-O-methylguanosine-3'-phosphate
  modified_base 20: mod_base = OTHER; note = 2'-O-methyluridine-3'-phosphate
  modified_base 21: mod_base = OTHER; note = 2'-O-methylguanosine-3'-phosphate attached to N-[tris(N-acetylgalactosamine-alkyl)-amidodecanoyl)]-4-hydr oxyprolinol Hyp-(N-acetylgalactosamine-alkyl)3
gggtcagcatgccaatatgtg

SEQ ID NO: 2843 - RNA, 23 nt, synthetic construct
  misc_feature 1..23: note = Description of Artificial Sequence: Synthetic oligonucleotide
  source 1..23: mol_type = other RNA
  modified_base 1: mod_base = OTHER; note = 2'-O-methylcytidine-3'- phosphorothioate
  modified_base 2: mod_base = OTHER; note = 2'-fluoroadenosine-3'-phosphorothioate
  modified_base 3: mod_base = OTHER; note = 2'-O-methylcytidine-3'-phosphate
  modified_base 4: mod_base = OTHER; note = 2'-O-methyladenosine-3'-phosphate
  modified_base 5: mod_base = OTHER; note = 2'-O-methyluridine-3'-phosphate
  modified_base 6: mod_base = OTHER; note = 2'-fluoroadenosine-3'-phosphate
  modified_base 7: mod_base = OTHER; note = 2'-O-methyluridine-3'-phosphate
  modified_base 8: mod_base = OTHER; note = 2'-fluorouridine-3'-phosphate
  modified_base 9: mod_base = OTHER; note = 2'-fluoroguanosine-3'-phosphate
  modified_base 10: mod_base = OTHER; note = 2'-O-methylguanosine-3'-phosphate
  modified_base 11: mod_base = OTHER; note = 2'-O-methylcytidine-3'-phosphate
  modified_base 12: mod_base = OTHER; note = 2'-O-methyladenosine-3'-phosphate
  modified_base 13: mod_base = OTHER; note = 2'-O-methyluridine-3'-phosphate
  modified_base 14: mod_base = OTHER; note = 2'-fluoroguanosine-3'-phosphate
  modified_base 15: mod_base = OTHER; note = 2'-O-methylcytidine-3'-phosphate
  modified_base 16: mod_base = OTHER; note = 2'-fluorouridine-3'-phosphate
  modified_base 17: mod_base = OTHER; note = 2'-O-methylguanosine-3'-phosphate
  modified_base 18: mod_base = OTHER; note = 2'-O-methyladenosine-3'-phosphate
  modified_base 19: mod_base = OTHER; note = 2'-O-methylcytidine-3'-phosphate
  modified_base 20: mod_base = OTHER; note = 2'-O-methylcytidine-3'-phosphate
  modified_base 21: mod_base = OTHER; note = 2'-O-methylcytidine-3'- phosphorothioate
  modified_base 22: mod_base = OTHER; note = 2'-O-methyluridine-3'-phosphorothioate
  modified_base 23: mod_base = OTHER; note = 2'-O-methylcytidine-3'-phosphate
cacatattggcatgctgaccctc

SEQ ID NO: 2844 - RNA, 21 nt, synthetic construct
  misc_feature 1..21: note = Description of Artificial Sequence: Synthetic oligonucleotide
  source 1..21: mol_type = other RNA
  modified_base 1: mod_base = OTHER; note = 2'-O-methylguanosine-3'- phosphorothioate
  modified_base 2: mod_base = OTHER; note = 2'-O-methylguanosine-3'- phosphorothioate
  modified_base 3: mod_base = OTHER; note = 2'-O-methyluridine-3'-phosphate
  modified_base 4: mod_base = OTHER; note = 2'-O-methylcytidine-3'-phosphate
  modified_base 5: mod_base = OTHER; note = 2'-O-methyladenosine-3'-phosphate
  modified_base 6: mod_base = OTHER; note = 2'-O-methylguanosine-3'-phosphate
  modified_base 7: mod_base = OTHER; note = 2'-fluorocytidine-3'-phosphate
  modified_base 8: mod_base = OTHER; note = 2'-O-methyladenosine-3'-phosphate
  modified_base 9: mod_base = OTHER; note = 2'-fluorouridine-3'-phosphate
  modified_base 10: mod_base = OTHER; note = 2'-fluoroguanosine-3'-phosphate
  modified_base 11: mod_base = OTHER; note = 2'-fluorocytidine-3'-phosphate
  modified_base 12: mod_base = OTHER; note = 2'-O-methylcytidine-3'-phosphate
  modified_base 13: mod_base = OTHER; note = 2'-O-methyladenosine-3'-phosphate
  modified_base 14: mod_base = OTHER; note = 2'-O-methyladenosine-3'-phosphate
  modified_base 15: mod_base = OTHER; note = 2'-O-methyluridine-3'-phosphate
  modified_base 16: mod_base = OTHER; note = 2'-O-methyladenosine-3'-phosphate
  modified_base 17: mod_base = OTHER; note = 2'-O-methyluridine-3'-phosphate
  modified_base 18: mod_base = OTHER; note = 2'-O-methylguanosine-3'-phosphate
  modified_base 19: mod_base = OTHER; note = 2'-O-methyluridine-3'-phosphate
  modified_base 20: mod_base = OTHER; note = 2'-O-methylguanosine-3'-phosphate
  modified_base 21: mod_base = OTHER; note = 2'-O-methyluridine-3'-phosphate attached to N-[tris(N-acetylgalactosamine-alkyl)-amidodecanoyl)]-4-hydr oxyprolinol Hyp-(N-acetylgalactosamine-alkyl)3
ggtcagcatgccaatatgtgt

SEQ ID NO: 2845 - RNA, 23 nt, synthetic construct
  misc_feature 1..23: note = Description of Artificial Sequence: Synthetic oligonucleotide
  source 1..23: mol_type = other RNA
  modified_base 1: mod_base = OTHER; note = 2'-O-methyladenosine-3'- phosphorothioate
  modified_base 2: mod_base = OTHER; note = 2'-fluorocytidine-3'-phosphorothioate
  modified_base 3: mod_base = OTHER; note = 2'-O-methyladenosine-3'-phosphate
  modified_base 4: mod_base = OTHER; note = 2'-O-methylcytidine-3'-phosphate
  modified_base 5: mod_base = OTHER; note = 2'-O-methyladenosine-3'-phosphate
  modified_base 6: mod_base = OTHER; note = 2'-fluorouridine-3'-phosphate
  modified_base 7: mod_base = OTHER; note = 2'-O-methyladenosine-3'-phosphate
  modified_base 8: mod_base = OTHER; note = 2'-fluorouridine-3'-phosphate
  modified_base 9: mod_base = OTHER; note = 2'-fluorouridine-3'-phosphate
  modified_base 10: mod_base = OTHER; note = 2'-O-methylguanosine-3'-phosphate
  modified_base 11: mod_base = OTHER; note = 2'-O-methylguanosine-3'-phosphate
  modified_base 12: mod_base = OTHER; note = 2'-O-methylcytidine-3'-phosphate
  modified_base 13: mod_base = OTHER; note = 2'-O-methyladenosine-3'-phosphate
  modified_base 14: mod_base = OTHER; note = 2'-fluorouridine-3'-phosphate
  modified_base 15: mod_base = OTHER; note = 2'-O-methylguanosine-3'-phosphate
  modified_base 16: mod_base = OTHER; note = 2'-fluorocytidine-3'-phosphate
  modified_base 17: mod_base = OTHER; note = 2'-O-methyluridine-3'-phosphate
  modified_base 18: mod_base = OTHER; note = 2'-O-methylguanosine-3'-phosphate
  modified_base 19: mod_base = OTHER; note = 2'-O-methyladenosine-3'-phosphate
  modified_base 20: mod_base = OTHER; note = 2'-O-methylcytidine-3'-phosphate
  modified_base 21: mod_base = OTHER; note = 2'-O-methylcytidine-3'- phosphorothioate
  modified_base 22: mod_base = OTHER; note = 2'-O-methylcytidine-3'- phosphorothioate
  modified_base 23: mod_base = OTHER; note = 2'-O-methyluridine-3'-phosphate
acacatattggcatgctgaccct

SEQ ID NO: 2846 - RNA, 21 nt, synthetic construct
  misc_feature 1..21: note = Description of Artificial Sequence: Synthetic oligonucleotide
  source 1..21: mol_type = other RNA
  modified_base 1: mod_base = OTHER; note = 2'-O-methylcytidine-3'- phosphorothioate
  modified_base 2: mod_base = OTHER; note = 2'-O-methyladenosine-3'- phosphorothioate
  modified_base 3: mod_base = OTHER; note = 2'-O-methylguanosine-3'-phosphate
  modified_base 4: mod_base = OTHER; note = 2'-O-methyladenosine-3'-phosphate
  modified_base 5: mod_base = OTHER; note = 2'-O-methylguanosine-3'-phosphate
  modified_base 6: mod_base = OTHER; note = 2'-O-methylguanosine-3'-phosphate
  modified_base 7: mod_base = OTHER; note = 2'-fluoroguanosine-3'-phosphate
  modified_base 8: mod_base = OTHER; note = 2'-O-methyluridine-3'-phosphate
  modified_base 9: mod_base = OTHER; note = 2'-fluorocytidine-3'-phosphate
  modified_base 10: mod_base = OTHER; note = 2'-fluoroadenosine-3'-phosphate
  modified_base 11: mod_base = OTHER; note = 2'-fluoroguanosine-3'-phosphate
  modified_base 12: mod_base = OTHER; note = 2'-O-methylcytidine-3'-phosphate
  modified_base 13: mod_base = OTHER; note = 2'-O-methyladenosine-3'-phosphate
  modified_base 14: mod_base = OTHER; note = 2'-O-methyluridine-3'-phosphate
  modified_base 15: mod_base = OTHER; note = 2'-O-methylguanosine-3'-phosphate
  modified_base 16: mod_base = OTHER; note = 2'-O-methylcytidine-3'-phosphate
  modified_base 17: mod_base = OTHER; note = 2'-O-methylcytidine-3'-phosphate
  modified_base 18: mod_base = OTHER; note = 2'-O-methyladenosine-3'-phosphate
  modified_base 19: mod_base = OTHER; note = 2'-O-methyladenosine-3'-phosphate
  modified_base 20: mod_base = OTHER; note = 2'-O-methyluridine-3'-phosphate
  modified_base 21: mod_base = OTHER; note = 2'-O-methyladenosine-3'-phosphate attached to N-[tris(N-acetylgalactosamine-alkyl)-amidodecanoyl)]-4-hydr oxyprolinol Hyp-(N-acetylgalactosamine-alkyl)3
cagagggtcagcatgccaata

SEQ ID NO: 2847 - RNA, 23 nt, synthetic construct
  misc_feature 1..23: note = Description of Artificial Sequence: Synthetic oligonucleotide
  source 1..23: mol_type = other RNA
  modified_base 1: mod_base = OTHER; note = 2'-O-methyluridine-3'-phosphorothioate
  modified_base 2: mod_base = OTHER; note = 2'-fluoroadenosine-3'-phosphorothioate
  modified_base 3: mod_base = OTHER; note = 2'-O-methyluridine-3'-phosphate
  modified_base 4: mod_base = OTHER; note = 2'-O-methyluridine-3'-phosphate
  modified_base 5: mod_base = OTHER; note = 2'-O-methylguanosine-3'-phosphate
  modified_base 6: mod_base = OTHER; note = 2'-fluoroguanosine-3'-phosphate
  modified_base 7: mod_base = OTHER; note = 2'-O-methylcytidine-3'-phosphate
  modified_base 8: mod_base = OTHER; note = 2'-fluoroadenosine-3'-phosphate
  modified_base 9: mod_base = OTHER; note = 2'-fluorouridine-3'-phosphate
  modified_base 10: mod_base = OTHER; note = 2'-O-methylguanosine-3'-phosphate
  modified_base 11: mod_base = OTHER; note = 2'-O-methylcytidine-3'-phosphate
  modified_base 12: mod_base = OTHER; note = 2'-O-methyluridine-3'-phosphate
  modified_base 13: mod_base = OTHER; note = 2'-O-methylguanosine-3'-phosphate
  modified_base 14: mod_base = OTHER; note = 2'-fluoroadenosine-3'-phosphate
  modified_base 15: mod_base = OTHER; note = 2'-O-methylcytidine-3'-phosphate
  modified_base 16: mod_base = OTHER; note = 2'-fluorocytidine-3'-phosphate
  modified_base 17: mod_base = OTHER; note = 2'-O-methylcytidine-3'-phosphate
  modified_base 18: mod_base = OTHER; note = 2'-O-methyluridine-3'-phosphate
  modified_base 19: mod_base = OTHER; note = 2'-O-methylcytidine-3'-phosphate
  modified_base 20: mod_base = OTHER; note = 2'-O-methyluridine-3'-phosphate
  modified_base 21: mod_base = OTHER; note = 2'-O-methylguanosine-3'- phosphorothioate
  modified_base 22: mod_base = OTHER; note = 2'-O-methyluridine-3'-phosphorothioate
  modified_base 23: mod_base = OTHER; note = 2'-O-methylcytidine-3'-phosphate
tattggcatgctgaccctctgtc

SEQ ID NO: 2848 - RNA, 21 nt, synthetic construct
  misc_feature 1..21: note = Description of Artificial Sequence: Synthetic oligonucleotide
  source 1..21: mol_type = other RNA
  modified_base 1: mod_base = OTHER; note = 2'-O-methyladenosine-3'- phosphorothioate
  modified_base 2: mod_base = OTHER; note = 2'-O-methylcytidine-3'- phosphorothioate
  modified_base 3: mod_base = OTHER; note = 2'-O-methyladenosine-3'-phosphate
  modified_base 4: mod_base = OTHER; note = 2'-O-methylguanosine-3'-phosphate
  modified_base 5: mod_base = OTHER; note = 2'-O-methyladenosine-3'-phosphate
  modified_base 6: mod_base = OTHER; note = 2'-O-methylguanosine-3'-phosphate
  modified_base 7: mod_base = OTHER; note = 2'-fluoroguanosine-3'-phosphate
  modified_base 8: mod_base = OTHER; note = 2'-O-methylguanosine-3'-phosphate
  modified_base 9: mod_base = OTHER; note = 2'-fluorouridine-3'-phosphate
  modified_base 10: mod_base = OTHER; note = 2'-fluorocytidine-3'-phosphate
  modified_base 11: mod_base = OTHER; note = 2'-fluoroadenosine-3'-phosphate
  modified_base 12: mod_base = OTHER; note = 2'-O-methylguanosine-3'-phosphate
  modified_base 13: mod_base = OTHER; note = 2'-O-methylcytidine-3'-phosphate
  modified_base 14: mod_base = OTHER; note = 2'-O-methyladenosine-3'-phosphate
  modified_base 15: mod_base = OTHER; note = 2'-O-methyluridine-3'-phosphate
  modified_base 16: mod_base = OTHER; note = 2'-O-methylguanosine-3'-phosphate
  modified_base 17: mod_base = OTHER; note = 2'-O-methylcytidine-3'-phosphate
  modified_base 18: mod_base = OTHER; note = 2'-O-methylcytidine-3'-phosphate
  modified_base 19: mod_base = OTHER; note = 2'-O-methyladenosine-3'-phosphate
  modified_base 20: mod_base = OTHER; note = 2'-O-methyladenosine-3'-phosphate
  modified_base 21: mod_base = OTHER; note = 2'-O-methyluridine-3'-phosphate attached to N-[tris(N-acetylgalactosamine-alkyl)-amidodecanoyl)]-4-hydr oxyprolinol Hyp-(N-acetylgalactosamine-alkyl)3
acagagggtcagcatgccaat

SEQ ID NO: 2849 - RNA, 23 nt, synthetic construct
  misc_feature 1..23: note = Description of Artificial Sequence: Synthetic oligonucleotide
  source 1..23: mol_type = other RNA
  modified_base 1: mod_base = OTHER; note = 2'-O-methyladenosine-3'- phosphorothioate
  modified_base 2: mod_base = OTHER; note = 2'-fluorouridine -3'-phosphorothioate
  modified_base 3: mod_base = OTHER; note = 2'-O-methyluridine-3'-phosphate
  modified_base 4: mod_base = OTHER; note = 2'-O-methylguanosine-3'-phosphate
  modified_base 5: mod_base = OTHER; note = 2'-O-methylguanosine-3'-phosphate
  modified_base 6: mod_base = OTHER; note = 2'-fluorocytidine-3'-phosphate
  modified_base 7: mod_base = OTHER; note = 2'-O-methyladenosine-3'-phosphate
  modified_base 8: mod_base = OTHER; note = 2'-fluorouridine-3'-phosphate
  modified_base 9: mod_base = OTHER; note = 2'-fluoroguanosine-3'-phosphate
  modified_base 10: mod_base = OTHER; note = 2'-O-methylcytidine-3'-phosphate
  modified_base 11: mod_base = OTHER; note = 2'-O-methyluridine-3'-phosphate
  modified_base 12: mod_base = OTHER; note = 2'-O-methylguanosine-3'-phosphate
  modified_base 13: mod_base = OTHER; note = 2'-O-methyladenosine-3'-phosphate
  modified_base 14: mod_base = OTHER; note = 2'-fluorocytidine-3'-phosphate
  modified_base 15: mod_base = OTHER; note = 2'-O-methylcytidine-3'-phosphate
  modified_base 16: mod_base = OTHER; note = 2'-fluorocytidine-3'-phosphate
  modified_base 17: mod_base = OTHER; note = 2'-O-methyluridine-3'-phosphate
  modified_base 18: mod_base = OTHER; note = 2'-O-methylcytidine-3'-phosphate
  modified_base 19: mod_base = OTHER; note = 2'-O-methyluridine-3'-phosphate
  modified_base 20: mod_base = OTHER; note = 2'-O-methylguanosine-3'-phosphate
  modified_base 21: mod_base = OTHER; note = 2'-O-methyluridine-3'-phosphorothioate
  modified_base 22: mod_base = OTHER; note = 2'-O-methylcytidine-3'- phosphorothioate
  modified_base 23: mod_base = OTHER; note = 2'-O-methylcytidine-3'-phosphate
attggcatgctgaccctctgtcc

SEQ ID NO: 2850 - RNA, 21 nt, synthetic construct
  misc_feature 1..21: note = Description of Artificial Sequence: Synthetic oligonucleotide
  source 1..21: mol_type = other RNA
  modified_base 1: mod_base = OTHER; note = 2'-O-methylguanosine-3'- phosphorothioate
  modified_base 2: mod_base = OTHER; note = 2'-O-methylcytidine-3'- phosphorothioate
  modified_base 3: mod_base = OTHER; note = 2'-O-methyluridine-3'-phosphate
  modified_base 4: mod_base = OTHER; note = 2'-O-methyluridine-3'-phosphate
  modified_base 5: mod_base = OTHER; note = 2'-O-methylguanosine-3'-phosphate
  modified_base 6: mod_base = OTHER; note = 2'-O-methyladenosine-3'-phosphate
  modified_base 7: mod_base = OTHER; note = 2'-fluoroadenosine-3'-phosphate
  modified_base 8: mod_base = OTHER; note = 2'-O-methyluridine-3'-phosphate
  modified_base 9: mod_base = OTHER; note = 2'-fluoroguanosine-3'-phosphate
  modified_base 10: mod_base = OTHER; note = 2'-fluoroguanosine-3'-phosphate
  modified_base 11: mod_base = OTHER; note = 2'-fluoroguanosine-3'-phosphate
  modified_base 12: mod_base = OTHER; note = 2'-O-methyladenosine-3'-phosphate
  modified_base 13: mod_base = OTHER; note = 2'-O-methyluridine-3'-phosphate
  modified_base 14: mod_base = OTHER; note = 2'-O-methylcytidine-3'-phosphate
  modified_base 15: mod_base = OTHER; note = 2'-O-methyluridine-3'-phosphate
  modified_base 16: mod_base = OTHER; note = 2'-O-methyluridine-3'-phosphate
  modified_base 17: mod_base = OTHER; note = 2'-O-methylguanosine-3'-phosphate
  modified_base 18: mod_base = OTHER; note = 2'-O-methylguanosine-3'-phosphate
  modified_base 19: mod_base = OTHER; note = 2'-O-methyluridine-3'-phosphate
  modified_base 20: mod_base = OTHER; note = 2'-O-methylguanosine-3'-phosphate
  modified_base 21: mod_base = OTHER; note = 2'-O-methyluridine-3'-phosphate attached to N-[tris(N-acetylgalactosamine-alkyl)-amidodecanoyl)]-4-hydr oxyprolinol Hyp-(N-acetylgalactosamine-alkyl)3
gcttgaatgggatcttggtgt

SEQ ID NO: 2851 - RNA, 23 nt, synthetic construct
  misc_feature 1..23: note = Description of Artificial Sequence: Synthetic oligonucleotide
  source 1..23: mol_type = other RNA
  modified_base 1: mod_base = OTHER; note = 2'-O-methyladenosine-3'- phosphorothioate
  modified_base 2: mod_base = OTHER; note = 2'-fluorocytidine-3'-phosphorothioate
  modified_base 3: mod_base = OTHER; note = 2'-O-methyladenosine-3'-phosphate
  modified_base 4: mod_base = OTHER; note = 2'-O-methylcytidine-3'-phosphate
  modified_base 5: mod_base = OTHER; note = 2'-O-methylcytidine-3'-phosphate
  modified_base 6: mod_base = OTHER; note = 2'-fluoroadenosine-3'-phosphate
  modified_base 7: mod_base = OTHER; note = 2'-O-methyladenosine-3'-phosphate
  modified_base 8: mod_base = OTHER; note = 2'-fluoroguanosine-3'-phosphate
  modified_base 9: mod_base = OTHER; note = 2'-fluoroadenosine-3'-phosphate
  modified_base 10: mod_base = OTHER; note = 2'-O-methyluridine-3'-phosphate
  modified_base 11: mod_base = OTHER; note = 2'-O-methylcytidine-3'-phosphate
  modified_base 12: mod_base = OTHER; note = 2'-O-methylcytidine-3'-phosphate
  modified_base 13: mod_base = OTHER; note = 2'-O-methylcytidine-3'-phosphate
  modified_base 14: mod_base = OTHER; note = 2'-fluoroadenosine-3'-phosphate
  modified_base 15: mod_base = OTHER; note = 2'-O-methyluridine-3'-phosphate
  modified_base 16: mod_base = OTHER; note = 2'-fluorouridine-3'-phosphate
  modified_base 17: mod_base = OTHER; note = 2'-O-methylcytidine-3'-phosphate
  modified_base 18: mod_base = OTHER; note = 2'-O-methyladenosine-3'-phosphate
  modified_base 19: mod_base = OTHER; note = 2'-O-methyladenosine-3'-phosphate
  modified_base 20: mod_base = OTHER; note = 2'-O-methylguanosine-3'-phosphate
  modified_base 21: mod_base = OTHER; note = 2'-O-methylcytidine-3'- phosphorothioate
  modified_base 22: mod_base = OTHER; note = 2'-O-methylcytidine-3'- phosphorothioate
  modified_base 23: mod_base = OTHER; note = 2'-O-methyladenosine-3'-phosphate
acaccaagatcccattcaagcca

SEQ ID NO: 2852 - RNA, 21 nt, synthetic construct
  misc_feature 1..21: note = Description of Artificial Sequence: Synthetic oligonucleotide
  source 1..21: mol_type = other RNA
  modified_base 1: mod_base = OTHER; note = 2'-O-methylcytidine-3'- phosphorothioate
  modified_base 2: mod_base = OTHER; note = 2'-O-methyluridine-3'-phosphorothioate
  modified_base 3: mod_base = OTHER; note = 2'-O-methyluridine-3'-phosphate
  modified_base 4: mod_base = OTHER; note = 2'-O-methylguanosine-3'-phosphate
  modified_base 5: mod_base = OTHER; note = 2'-O-methyladenosine-3'-phosphate
  modified_base 6: mod_base = OTHER; note = 2'-O-methyladenosine-3'-phosphate
  modified_base 7: mod_base = OTHER; note = 2'-fluorouridine-3'-phosphate
  modified_base 8: mod_base = OTHER; note = 2'-O-methylguanosine-3'-phosphate
  modified_base 9: mod_base = OTHER; note = 2'-fluoroguanosine-3'-phosphate
  modified_base 10: mod_base = OTHER; note = 2'-fluoroguanosine-3'-phosphate
  modified_base 11: mod_base = OTHER; note = 2'-fluoroadenosine-3'-phosphate
  modified_base 12: mod_base = OTHER; note = 2'-O-methyluridine-3'-phosphate
  modified_base 13: mod_base = OTHER; note = 2'-O-methylcytidine-3'-phosphate
  modified_base 14: mod_base = OTHER; note = 2'-O-methyluridine-3'-phosphate
  modified_base 15: mod_base = OTHER; note = 2'-O-methyluridine-3'-phosphate
  modified_base 16: mod_base = OTHER; note = 2'-O-methylguanosine-3'-phosphate
  modified_base 17: mod_base = OTHER; note = 2'-O-methylguanosine-3'-phosphate
  modified_base 18: mod_base = OTHER; note = 2'-O-methyluridine-3'-phosphate
  modified_base 19: mod_base = OTHER; note = 2'-O-methylguanosine-3'-phosphate
  modified_base 20: mod_base = OTHER; note = 2'-O-methyluridine-3'-phosphate
  modified_base 21: mod_base = OTHER; note = 2'-O-methylcytidine-3'-phosphate attached to N-[tris(N-acetylgalactosamine-alkyl)-amidodecanoyl)]-4-hydr oxyprolinol Hyp-(N-acetylgalactosamine-alkyl)3
cttgaatgggatcttggtgtc

SEQ ID NO: 2853 - RNA, 23 nt, synthetic construct
  misc_feature 1..23: note = Description of Artificial Sequence: Synthetic oligonucleotide
  source 1..23: mol_type = other RNA
  modified_base 1: mod_base = OTHER; note = 2'-O-methylguanosine-3'- phosphorothioate
  modified_base 2: mod_base = OTHER; note = 2'-fluoroadenosine-3'-phosphorothioate
  modified_base 3: mod_base = OTHER; note = 2'-O-methylcytidine-3'-phosphate
  modified_base 4: mod_base = OTHER; note = 2'-O-methyladenosine-3'-phosphate
  modified_base 5: mod_base = OTHER; note = 2'-O-methylcytidine-3'-phosphate
  modified_base 6: mod_base = OTHER; note = 2'-fluorocytidine-3'-phosphate
  modified_base 7: mod_base = OTHER; note = 2'-O-methyladenosine-3'-phosphate
  modified_base 8: mod_base = OTHER; note = 2'-fluoroadenosine-3'-phosphate
  modified_base 9: mod_base = OTHER; note = 2'-fluoroguanosine-3'-phosphate
  modified_base 10: mod_base = OTHER; note = 2'-O-methyladenosine-3'-phosphate
  modified_base 11: mod_base = OTHER; note = 2'-O-methyluridine-3'-phosphate
  modified_base 12: mod_base = OTHER; note = 2'-O-methylcytidine-3'-phosphate
  modified_base 13: mod_base = OTHER; note = 2'-O-methylcytidine-3'-phosphate
  modified_base 14: mod_base = OTHER; note = 2'-fluorocytidine-3'-phosphate
  modified_base 15: mod_base = OTHER; note = 2'-O-methyladenosine-3'-phosphate
  modified_base 16: mod_base = OTHER; note = 2'-fluorouridine-3'-phosphate
  modified_base 17: mod_base = OTHER; note = 2'-O-methyluridine-3'-phosphate
  modified_base 18: mod_base = OTHER; note = 2'-O-methylcytidine-3'-phosphate
  modified_base 19: mod_base = OTHER; note = 2'-O-methyladenosine-3'-phosphate
  modified_base 20: mod_base = OTHER; note = 2'-O-methyladenosine-3'-phosphate
  modified_base 21: mod_base = OTHER; note = 2'-O-methylguanosine-3'- phosphorothioate
  modified_base 22: mod_base = OTHER; note = 2'-O-methylcytidine-3'- phosphorothioate
  modified_base 23: mod_base = OTHER; note = 2'-O-methylcytidine-3'-phosphate
gacaccaagatcccattcaagcc

SEQ ID NO: 2854 - RNA, 21 nt, synthetic construct
  misc_feature 1..21: note = Description of Artificial Sequence: Synthetic oligonucleotide
  source 1..21: mol_type = other RNA
  modified_base 1: mod_base = OTHER; note = 2'-O-methylcytidine-3'- phosphorothioate
  modified_base 2: mod_base = OTHER; note = 2'-O-methyladenosine-3'- phosphorothioate
  modified_base 3: mod_base = OTHER; note = 2'-O-methyluridine-3'-phosphate
  modified_base 4: mod_base = OTHER; note = 2'-O-methylguanosine-3'-phosphate
  modified_base 5: mod_base = OTHER; note = 2'-O-methylguanosine-3'-phosphate
  modified_base 6: mod_base = OTHER; note = 2'-O-methylcytidine-3'-phosphate
  modified_base 7: mod_base = OTHER; note = 2'-fluorouridine-3'-phosphate
  modified_base 8: mod_base = OTHER; note = 2'-O-methyluridine-3'-phosphate
  modified_base 9: mod_base = OTHER; note = 2'-fluoroguanosine-3'-phosphate
  modified_base 10: mod_base = OTHER; note = 2'-fluoroadenosine-3'-phosphate
  modified_base 11: mod_base = OTHER; note = 2'-fluoroadenosine-3'-phosphate
  modified_base 12: mod_base = OTHER; note = 2'-O-methyluridine-3'-phosphate
  modified_base 13: mod_base = OTHER; note = 2'-O-methylguanosine-3'-phosphate
  modified_base 14: mod_base = OTHER; note = 2'-O-methylguanosine-3'-phosphate
  modified_base 15: mod_base = OTHER; note = 2'-O-methylguanosine-3'-phosphate
  modified_base 16: mod_base = OTHER; note = 2'-O-methyladenosine-3'-phosphate
  modified_base 17: mod_base = OTHER; note = 2'-O-methyluridine-3'-phosphate
  modified_base 18: mod_base = OTHER; note = 2'-O-methylcytidine-3'-phosphate
  modified_base 19: mod_base = OTHER; note = 2'-O-methyluridine-3'-phosphate
  modified_base 20: mod_base = OTHER; note = 2'-O-methyluridine-3'-phosphate
  modified_base 21: mod_base = OTHER; note = 2'-O-methylguanosine-3'-phosphate attached to N-[tris(N-acetylgalactosamine-alkyl)-amidodecanoyl)]-4-hydr oxyprolinol Hyp-(N-acetylgalactosamine-alkyl)3
catggcttgaatgggatcttg

SEQ ID NO: 2855 - RNA, 23 nt, synthetic construct
  misc_feature 1..23: note = Description of Artificial Sequence: Synthetic oligonucleotide
  source 1..23: mol_type = other RNA
  modified_base 1: mod_base = OTHER; note = 2'-O-methylcytidine-3'- phosphorothioate
  modified_base 2: mod_base = OTHER; note = 2'-fluoroadenosine-3'-phosphorothioate
  modified_base 3: mod_base = OTHER; note = 2'-O-methyladenosine-3'-phosphate
  modified_base 4: mod_base = OTHER; note = 2'-O-methylguanosine-3'-phosphate
  modified_base 5: mod_base = OTHER; note = 2'-O-methyladenosine-3'-phosphate
  modified_base 6: mod_base = OTHER; note = 2'-fluorouridine-3'-phosphate
  modified_base 7: mod_base = OTHER; note = 2'-O-methylcytidine-3'-phosphate
  modified_base 8: mod_base = OTHER; note = 2'-fluorocytidine-3'-phosphate
  modified_base 9: mod_base = OTHER; note = 2'-fluorocytidine-3'-phosphate
  modified_base 10: mod_base = OTHER; note = 2'-O-methyladenosine-3'-phosphate
  modified_base 11: mod_base = OTHER; note = 2'-O-methyluridine-3'-phosphate
  modified_base 12: mod_base = OTHER; note = 2'-O-methyluridine-3'-phosphate
  modified_base 13: mod_base = OTHER; note = 2'-O-methylcytidine-3'-phosphate
  modified_base 14: mod_base = OTHER; note = 2'-fluoroadenosine-3'-phosphate
  modified_base 15: mod_base = OTHER; note = 2'-O-methyladenosine-3'-phosphate
  modified_base 16: mod_base = OTHER; note = 2'-fluoroguanosine-3'-phosphate
  modified_base 17: mod_base = OTHER; note = 2'-O-methylcytidine-3'-phosphate
  modified_base 18: mod_base = OTHER; note = 2'-O-methylcytidine-3'-phosphate
  modified_base 19: mod_base = OTHER; note = 2'-O-methyladenosine-3'-phosphate
  modified_base 20: mod_base = OTHER; note = 2'-O-methyluridine-3'-phosphate
  modified_base 21: mod_base = OTHER; note = 2'-O-methylguanosine-3'- phosphorothioate
  modified_base 22: mod_base = OTHER; note = 2'-O-methyluridine-3'-phosphorothioate
  modified_base 23: mod_base = OTHER; note = 2'-O-methyluridine-3'-phosphate
caagatcccattcaagccatgtt

SEQ ID NO: 2856 - RNA, 21 nt, synthetic construct
  misc_feature 1..21: note = Description of Artificial Sequence: Synthetic oligonucleotide
  source 1..21: mol_type = other RNA
  modified_base 1: mod_base = OTHER; note = 2'-O-methyladenosine-3'- phosphorothioate
  modified_base 2: mod_base = OTHER; note = 2'-O-methylcytidine-3'- phosphorothioate
  modified_base 3: mod_base = OTHER; note = 2'-O-methyladenosine-3'-phosphate
  modified_base 4: mod_base = OTHER; note = 2'-O-methyluridine-3'-phosphate
  modified_base 5: mod_base = OTHER; note = 2'-O-methylguanosine-3'-phosphate
  modified_base 6: mod_base = OTHER; note = 2'-O-methylguanosine-3'-phosphate
  modified_base 7: mod_base = OTHER; note = 2'-fluorocytidine-3'-phosphate
  modified_base 8: mod_base = OTHER; note = 2'-O-methyluridine-3'-phosphate
  modified_base 9: mod_base = OTHER; note = 2'-fluorouridine-3'-phosphate
  modified_base 10: mod_base = OTHER; note = 2'-fluoroguanosine-3'-phosphate
  modified_base 11: mod_base = OTHER; note = 2'-fluoroadenosine-3'-phosphate
  modified_base 12: mod_base = OTHER; note = 2'-O-methyladenosine-3'-phosphate
  modified_base 13: mod_base = OTHER; note = 2'-O-methyluridine-3'-phosphate
  modified_base 14: mod_base = OTHER; note = 2'-O-methylguanosine-3'-phosphate
  modified_base 15: mod_base = OTHER; note = 2'-O-methylguanosine-3'-phosphate
  modified_base 16: mod_base = OTHER; note = 2'-O-methylguanosine-3'-phosphate
  modified_base 17: mod_base = OTHER; note = 2'-O-methyladenosine-3'-phosphate
  modified_base 18: mod_base = OTHER; note = 2'-O-methyluridine-3'-phosphate
  modified_base 19: mod_base = OTHER; note = 2'-O-methylcytidine-3'-phosphate
  modified_base 20: mod_base = OTHER; note = 2'-O-methyluridine-3'-phosphate
  modified_base 21: mod_base = OTHER; note = 2'-O-methyluridine-3'-phosphate attached to N-[tris(N-acetylgalactosamine-alkyl)-amidodecanoyl)]-4-hydr oxyprolinol Hyp-(N-acetylgalactosamine-alkyl)3
acatggcttgaatgggatctt

SEQ ID NO: 2857 - RNA, 23 nt, synthetic construct
  misc_feature 1..23: note = Description of Artificial Sequence: Synthetic oligonucleotide
  source 1..23: mol_type = other RNA
  modified_base 1: mod_base = OTHER; note = 2'-O-methyladenosine-3'- phosphorothioate
  modified_base 2: mod_base = OTHER; note = 2'-fluoroadenosine-3'-phosphorothioate
  modified_base 3: mod_base = OTHER; note = 2'-O-methylguanosine-3'-phosphate
  modified_base 4: mod_base = OTHER; note = 2'-O-methyladenosine-3'-phosphate
  modified_base 5: mod_base = OTHER; note = 2'-O-methyluridine-3'-phosphate
  modified_base 6: mod_base = OTHER; note = 2'-fluorocytidine-3'-phosphate
  modified_base 7: mod_base = OTHER; note = 2'-O-methylcytidine-3'-phosphate
  modified_base 8: mod_base = OTHER; note = 2'-fluorocytidine-3'-phosphate
  modified_base 9: mod_base = OTHER; note = 2'-fluoroadenosine-3'-phosphate
  modified_base 10: mod_base = OTHER; note = 2'-O-methyluridine-3'-phosphate
  modified_base 11: mod_base = OTHER; note = 2'-O-methyluridine-3'-phosphate
  modified_base 12: mod_base = OTHER; note = 2'-O-methylcytidine-3'-phosphate
  modified_base 13: mod_base = OTHER; note = 2'-O-methyladenosine-3'-phosphate
  modified_base 14: mod_base = OTHER; note = 2'-fluoroadenosine-3'-phosphate
  modified_base 15: mod_base = OTHER; note = 2'-O-methylguanosine-3'-phosphate
  modified_base 16: mod_base = OTHER; note = 2'-fluorocytidine-3'-phosphate
  modified_base 17: mod_base = OTHER; note = 2'-O-methylcytidine-3'-phosphate
  modified_base 18: mod_base = OTHER; note = 2'-O-methyladenosine-3'-phosphate
  modified_base 19: mod_base = OTHER; note = 2'-O-methyluridine-3'-phosphate
  modified_base 20: mod_base = OTHER; note = 2'-O-methylguanosine-3'-phosphate
  modified_base 21: mod_base = OTHER; note = 2'-O-methyluridine-3'-phosphorothioate
  modified_base 22: mod_base = OTHER; note = 2'-O-methyluridine-3'-phosphorothioate
  modified_base 23: mod_base = OTHER; note = 2'-O-methyluridine-3'-phosphate
aagatcccattcaagccatgttt

SEQ ID NO: 2858 - RNA, 21 nt, synthetic construct
  misc_feature 1..21: note = Description of Artificial Sequence: Synthetic oligonucleotide
  source 1..21: mol_type = other RNA
  modified_base 1: mod_base = OTHER; note = 2'-O-methyluridine-3'-phosphorothioate
  modified_base 2: mod_base = OTHER; note = 2'-O-methylcytidine-3'- phosphorothioate
  modified_base 3: mod_base = OTHER; note = 2'-O-methyladenosine-3'-phosphate
  modified_base 4: mod_base = OTHER; note = 2'-O-methyladenosine-3'-phosphate
  modified_base 5: mod_base = OTHER; note = 2'-O-methyladenosine-3'-phosphate
  modified_base 6: mod_base = OTHER; note = 2'-O-methyluridine-3'-phosphate
  modified_base 7: mod_base = OTHER; note = 2'-fluoroguanosine-3'-phosphate
  modified_base 8: mod_base = OTHER; note = 2'-O-methylguanosine-3'-phosphate
  modified_base 9: mod_base = OTHER; note = 2'-fluorocytidine-3'-phosphate
  modified_base 10: mod_base = OTHER; note = 2'-fluorouridine-3'-phosphate
  modified_base 11: mod_base = OTHER; note = 2'-fluoroguanosine-3'-phosphate
  modified_base 12: mod_base = OTHER; note = 2'-O-methyladenosine-3'-phosphate
  modified_base 13: mod_base = OTHER; note = 2'-O-methylguanosine-3'-phosphate
  modified_base 14: mod_base = OTHER; note = 2'-O-methyladenosine-3'-phosphate
  modified_base 15: mod_base = OTHER; note = 2'-O-methyladenosine-3'-phosphate
  modified_base 16: mod_base = OTHER; note = 2'-O-methylguanosine-3'-phosphate
  modified_base 17: mod_base = OTHER; note = 2'-O-methyladenosine-3'-phosphate
  modified_base 18: mod_base = OTHER; note = 2'-O-methylcytidine-3'-phosphate
  modified_base 19: mod_base = OTHER; note = 2'-O-methyluridine-3'-phosphate
  modified_base 20: mod_base = OTHER; note = 2'-O-methylguanosine-3'-phosphate
  modified_base 21: mod_base = OTHER; note = 2'-O-methyladenosine-3'-phosphate attached to N-[tris(N-acetylgalactosamine-alkyl)-amidodecanoyl)]-4-hydr oxyprolinol Hyp-(N-acetylgalactosamine-alkyl)3
tcaaatggctgagaagactga

SEQ ID NO: 2859 - RNA, 23 nt, synthetic construct
  misc_feature 1..23: note = Description of Artificial Sequence: Synthetic oligonucleotide
  source 1..23: mol_type = other RNA
  modified_base 1: mod_base = OTHER; note = 2'-O-methyluridine-3'-phosphorothioate
  modified_base 2: mod_base = OTHER; note = 2'-fluorocytidine-3'-phosphorothioate
  modified_base 3: mod_base = OTHER; note = 2'-O-methyladenosine-3'-phosphate
  modified_base 4: mod_base = OTHER; note = 2'-O-methylguanosine-3'-phosphate
  modified_base 5: mod_base = OTHER; note = 2'-O-methyluridine-3'-phosphate
  modified_base 6: mod_base = OTHER; note = 2'-fluorocytidine-3'-phosphate
  modified_base 7: mod_base = OTHER; note = 2'-O-methyluridine-3'-phosphate
  modified_base 8: mod_base = OTHER; note = 2'-fluorouridine-3'-phosphate
  modified_base 9: mod_base = OTHER; note = 2'-fluorocytidine-3'-phosphate
  modified_base 10: mod_base = OTHER; note = 2'-O-methyluridine-3'-phosphate
  modified_base 11: mod_base = OTHER; note = 2'-O-methylcytidine-3'-phosphate
  modified_base 12: mod_base = OTHER; note = 2'-O-methyladenosine-3'-phosphate
  modified_base 13: mod_base = OTHER; note = 2'-O-methylguanosine-3'-phosphate
  modified_base 14: mod_base = OTHER; note = 2'-fluorocytidine-3'-phosphate
  modified_base 15: mod_base = OTHER; note = 2'-O-methylcytidine-3'-phosphate
  modified_base 16: mod_base = OTHER; note = 2'-fluoroadenosine-3'-phosphate
  modified_base 17: mod_base = OTHER; note = 2'-O-methyluridine-3'-phosphate
  modified_base 18: mod_base = OTHER; note = 2'-O-methyluridine-3'-phosphate
  modified_base 19: mod_base = OTHER; note = 2'-O-methyluridine-3'-phosphate
  modified_base 20: mod_base = OTHER; note = 2'-O-methylguanosine-3'-phosphate
  modified_base 21: mod_base = OTHER; note = 2'-O-methyladenosine-3'- phosphorothioate
  modified_base 22: mod_base = OTHER; note = 2'-O-methyluridine-3'-phosphorothioate
  modified_base 23: mod_base = OTHER; note = 2'-O-methyladenosine-3'-phosphate
tcagtcttctcagccatttgata

SEQ ID NO: 2860 - RNA, 21 nt, synthetic construct
  misc_feature 1..21: note = Description of Artificial Sequence: Synthetic oligonucleotide
  source 1..21: mol_type = other RNA
  modified_base 1: mod_base = OTHER; note = 2'-O-methylcytidine-3'- phosphorothioate
  modified_base 2: mod_base = OTHER; note = 2'-O-methyladenosine-3'- phosphorothioate
  modified_base 3: mod_base = OTHER; note = 2'-O-methyladenosine-3'-phosphate
  modified_base 4: mod_base = OTHER; note = 2'-O-methyladenosine-3'-phosphate
  modified_base 5: mod_base = OTHER; note = 2'-O-methyluridine-3'-phosphate
  modified_base 6: mod_base = OTHER; note = 2'-O-methylguanosine-3'-phosphate
  modified_base 7: mod_base = OTHER; note = 2'-fluoroguanosine-3'-phosphate
  modified_base 8: mod_base = OTHER; note = 2'-O-methylcytidine-3'-phosphate
  modified_base 9: mod_base = OTHER; note = 2'-fluorouridine-3'-phosphate
  modified_base 10: mod_base = OTHER; note = 2'-fluoroguanosine-3'-phosphate
  modified_base 11: mod_base = OTHER; note = 2'-fluoroadenosine-3'-phosphate
  modified_base 12: mod_base = OTHER; note = 2'-O-methylguanosine-3'-phosphate
  modified_base 13: mod_base = OTHER; note = 2'-O-methyladenosine-3'-phosphate
  modified_base 14: mod_base = OTHER; note = 2'-O-methyladenosine-3'-phosphate
  modified_base 15: mod_base = OTHER; note = 2'-O-methylguanosine-3'-phosphate
  modified_base 16: mod_base = OTHER; note = 2'-O-methyladenosine-3'-phosphate
  modified_base 17: mod_base = OTHER; note = 2'-O-methylcytidine-3'-phosphate
  modified_base 18: mod_base = OTHER; note = 2'-O-methyluridine-3'-phosphate
  modified_base 19: mod_base = OTHER; note = 2'-O-methylguanosine-3'-phosphate
  modified_base 20: mod_base = OTHER; note = 2'-O-methyladenosine-3'-phosphate
  modified_base 21: mod_base = OTHER; note = 2'-O-methylcytidine-3'-phosphate attached to N-[tris(N-acetylgalactosamine-alkyl)-amidodecanoyl)]-4-hydr oxyprolinol Hyp-(N-acetylgalactosamine-alkyl)3
caaatggctgagaagactgac

SEQ ID NO: 2861 - RNA, 23 nt, synthetic construct
  misc_feature 1..23: note = Description of Artificial Sequence: Synthetic oligonucleotide
  source 1..23: mol_type = other RNA
  modified_base 1: mod_base = OTHER; note = 2'-O-methylguanosine-3'- phosphorothioate
  modified_base 2: mod_base = OTHER; note = 2'-fluorouridine -3'-phosphorothioate
  modified_base 3: mod_base = OTHER; note = 2'-O-methylcytidine-3'-phosphate
  modified_base 4: mod_base = OTHER; note = 2'-O-methyladenosine-3'-phosphate
  modified_base 5: mod_base = OTHER; note = 2'-O-methylguanosine-3'-phosphate
  modified_base 6: mod_base = OTHER; note = 2'-fluorouridine-3'-phosphate
  modified_base 7: mod_base = OTHER; note = 2'-O-methylcytidine-3'-phosphate
  modified_base 8: mod_base = OTHER; note = 2'-fluorouridine-3'-phosphate
  modified_base 9: mod_base = OTHER; note = 2'-fluorouridine-3'-phosphate
  modified_base 10: mod_base = OTHER; note = 2'-O-methylcytidine-3'-phosphate
  modified_base 11: mod_base = OTHER; note = 2'-O-methyluridine-3'-phosphate
  modified_base 12: mod_base = OTHER; note = 2'-O-methylcytidine-3'-phosphate
  modified_base 13: mod_base = OTHER; note = 2'-O-methyladenosine-3'-phosphate
  modified_base 14: mod_base = OTHER; note = 2'-fluoroguanosine-3'-phosphate
  modified_base 15: mod_base = OTHER; note = 2'-O-methylcytidine-3'-phosphate
  modified_base 16: mod_base = OTHER; note = 2'-fluorocytidine-3'-phosphate
  modified_base 17: mod_base = OTHER; note = 2'-O-methyladenosine-3'-phosphate
  modified_base 18: mod_base = OTHER; note = 2'-O-methyluridine-3'-phosphate
  modified_base 19: mod_base = OTHER; note = 2'-O-methyluridine-3'-phosphate
  modified_base 20: mod_base = OTHER; note = 2'-O-methyluridine-3'-phosphate
  modified_base 21: mod_base = OTHER; note = 2'-O-methylguanosine-3'- phosphorothioate
  modified_base 22: mod_base = OTHER; note = 2'-O-methyladenosine-3'- phosphorothioate
  modified_base 23: mod_base = OTHER; note = 2'-O-methyluridine-3'-phosphate
gtcagtcttctcagccatttgat

SEQ ID NO: 2862 - RNA, 21 nt, synthetic construct
  misc_feature 1..21: note = Description of Artificial Sequence: Synthetic oligonucleotide
  source 1..21: mol_type = other RNA
  modified_base 1: mod_base = OTHER; note = 2'-O-methylguanosine-3'- phosphorothioate
  modified_base 2: mod_base = OTHER; note = 2'-O-methyladenosine-3'- phosphorothioate
  modified_base 3: mod_base = OTHER; note = 2'-O-methyluridine-3'-phosphate
  modified_base 4: mod_base = OTHER; note = 2'-O-methyladenosine-3'-phosphate
  modified_base 5: mod_base = OTHER; note = 2'-O-methyluridine-3'-phosphate
  modified_base 6: mod_base = OTHER; note = 2'-O-methylcytidine-3'-phosphate
  modified_base 7: mod_base = OTHER; note = 2'-fluoroadenosine-3'-phosphate
  modified_base 8: mod_base = OTHER; note = 2'-O-methyladenosine-3'-phosphate
  modified_base 9: mod_base = OTHER; note = 2'-fluoroadenosine-3'-phosphate
  modified_base 10: mod_base = OTHER; note = 2'-fluorouridine-3'-phosphate
  modified_base 11: mod_base = OTHER; note = 2'-fluoroguanosine-3'-phosphate
  modified_base 12: mod_base = OTHER; note = 2'-O-methylguanosine-3'-phosphate
  modified_base 13: mod_base = OTHER; note = 2'-O-methylcytidine-3'-phosphate
  modified_base 14: mod_base = OTHER; note = 2'-O-methyluridine-3'-phosphate
  modified_base 15: mod_base = OTHER; note = 2'-O-methylguanosine-3'-phosphate
  modified_base 16: mod_base = OTHER; note = 2'-O-methyladenosine-3'-phosphate
  modified_base 17: mod_base = OTHER; note = 2'-O-methylguanosine-3'-phosphate
  modified_base 18: mod_base = OTHER; note = 2'-O-methyladenosine-3'-phosphate
  modified_base 19: mod_base = OTHER; note = 2'-O-methyladenosine-3'-phosphate
  modified_base 20: mod_base = OTHER; note = 2'-O-methylguanosine-3'-phosphate
  modified_base 21: mod_base = OTHER; note = 2'-O-methyladenosine-3'-phosphate attached to N-[tris(N-acetylgalactosamine-alkyl)-amidodecanoyl)]-4-hydr oxyprolinol Hyp-(N-acetylgalactosamine-alkyl)3
gatatcaaatggctgagaaga

SEQ ID NO: 2863 - RNA, 23 nt, synthetic construct
  misc_feature 1..23: note = Description of Artificial Sequence: Synthetic oligonucleotide
  source 1..23: mol_type = other RNA
  modified_base 1: mod_base = OTHER; note = 2'-O-methyluridine-3'-phosphorothioate
  modified_base 2: mod_base = OTHER; note = 2'-fluorocytidine-3'-phosphorothioate
  modified_base 3: mod_base = OTHER; note = 2'-O-methyluridine-3'-phosphate
  modified_base 4: mod_base = OTHER; note = 2'-O-methyluridine-3'-phosphate
  modified_base 5: mod_base = OTHER; note = 2'-O-methylcytidine-3'-phosphate
  modified_base 6: mod_base = OTHER; note = 2'-fluorouridine-3'-phosphate
  modified_base 7: mod_base = OTHER; note = 2'-O-methylcytidine-3'-phosphate
  modified_base 8: mod_base = OTHER; note = 2'-fluoroadenosine-3'-phosphate
  modified_base 9: mod_base = OTHER; note = 2'-fluoroguanosine-3'-phosphate
  modified_base 10: mod_base = OTHER; note = 2'-O-methylcytidine-3'-phosphate
  modified_base 11: mod_base = OTHER; note = 2'-O-methylcytidine-3'-phosphate
  modified_base 12: mod_base = OTHER; note = 2'-O-methyladenosine-3'-phosphate
  modified_base 13: mod_base = OTHER; note = 2'-O-methyluridine-3'-phosphate
  modified_base 14: mod_base = OTHER; note = 2'-fluorouridine-3'-phosphate
  modified_base 15: mod_base = OTHER; note = 2'-O-methyluridine-3'-phosphate
  modified_base 16: mod_base = OTHER; note = 2'-fluoroguanosine-3'-phosphate
  modified_base 17: mod_base = OTHER; note = 2'-O-methyladenosine-3'-phosphate
  modified_base 18: mod_base = OTHER; note = 2'-O-methyluridine-3'-phosphate
  modified_base 19: mod_base = OTHER; note = 2'-O-methyladenosine-3'-phosphate
  modified_base 20: mod_base = OTHER; note = 2'-O-methyluridine-3'-phosphate
  modified_base 21: mod_base = OTHER; note = 2'-O-methylcytidine-3'- phosphorothioate
  modified_base 22: mod_base = OTHER; note = 2'-O-methyluridine-3'-phosphorothioate
  modified_base 23: mod_base = OTHER; note = 2'-O-methyluridine-3'-phosphate
tcttctcagccatttgatatctt

SEQ ID NO: 2864 - RNA, 21 nt, synthetic construct
  misc_feature 1..21: note = Description of Artificial Sequence: Synthetic oligonucleotide
  source 1..21: mol_type = other RNA
  modified_base 1: mod_base = OTHER; note = 2'-O-methyladenosine-3'- phosphorothioate
  modified_base 2: mod_base = OTHER; note = 2'-O-methylguanosine-3'- phosphorothioate
  modified_base 3: mod_base = OTHER; note = 2'-O-methyladenosine-3'-phosphate
  modified_base 4: mod_base = OTHER; note = 2'-O-methyluridine-3'-phosphate
  modified_base 5: mod_base = OTHER; note = 2'-O-methyladenosine-3'-phosphate
  modified_base 6: mod_base = OTHER; note = 2'-O-methyluridine-3'-phosphate
  modified_base 7: mod_base = OTHER; note = 2'-fluorocytidine-3'-phosphate
  modified_base 8: mod_base = OTHER; note = 2'-O-methyladenosine-3'-phosphate
  modified_base 9: mod_base = OTHER; note = 2'-fluoroadenosine-3'-phosphate
  modified_base 10: mod_base = OTHER; note = 2'-fluoroadenosine-3'-phosphate
  modified_base 11: mod_base = OTHER; note = 2'-fluorouridine-3'-phosphate
  modified_base 12: mod_base = OTHER; note = 2'-O-methylguanosine-3'-phosphate
  modified_base 13: mod_base = OTHER; note = 2'-O-methylguanosine-3'-phosphate
  modified_base 14: mod_base = OTHER; note = 2'-O-methylcytidine-3'-phosphate
  modified_base 15: mod_base = OTHER; note = 2'-O-methyluridine-3'-phosphate
  modified_base 16: mod_base = OTHER; note = 2'-O-methylguanosine-3'-phosphate
  modified_base 17: mod_base = OTHER; note = 2'-O-methyladenosine-3'-phosphate
  modified_base 18: mod_base = OTHER; note = 2'-O-methylguanosine-3'-phosphate
  modified_base 19: mod_base = OTHER; note = 2'-O-methyladenosine-3'-phosphate
  modified_base 20: mod_base = OTHER; note = 2'-O-methyladenosine-3'-phosphate
  modified_base 21: mod_base = OTHER; note = 2'-O-methylguanosine-3'-phosphate attached to N-[tris(N-acetylgalactosamine-alkyl)-amidodecanoyl)]-4-hydr oxyprolinol Hyp-(N-acetylgalactosamine-alkyl)3
agatatcaaatggctgagaag

SEQ ID NO: 2865 - RNA, 23 nt, synthetic construct
  misc_feature 1..23: note = Description of Artificial Sequence: Synthetic oligonucleotide
  source 1..23: mol_type = other RNA
  modified_base 1: mod_base = OTHER; note = 2'-O-methylcytidine-3'- phosphorothioate
  modified_base 2: mod_base = OTHER; note = 2'-fluorouridine -3'-phosphorothioate
  modified_base 3: mod_base = OTHER; note = 2'-O-methyluridine-3'-phosphate
  modified_base 4: mod_base = OTHER; note = 2'-O-methylcytidine-3'-phosphate
  modified_base 5: mod_base = OTHER; note = 2'-O-methyluridine-3'-phosphate
  modified_base 6: mod_base = OTHER; note = 2'-fluorocytidine-3'-phosphate
  modified_base 7: mod_base = OTHER; note = 2'-O-methyladenosine-3'-phosphate
  modified_base 8: mod_base = OTHER; note = 2'-fluoroguanosine-3'-phosphate
  modified_base 9: mod_base = OTHER; note = 2'-fluorocytidine-3'-phosphate
  modified_base 10: mod_base = OTHER; note = 2'-O-methylcytidine-3'-phosphate
  modified_base 11: mod_base = OTHER; note = 2'-O-methyladenosine-3'-phosphate
  modified_base 12: mod_base = OTHER; note = 2'-O-methyluridine-3'-phosphate
  modified_base 13: mod_base = OTHER; note = 2'-O-methyluridine-3'-phosphate
  modified_base 14: mod_base = OTHER; note = 2'-fluorouridine-3'-phosphate
  modified_base 15: mod_base = OTHER; note = 2'-O-methylguanosine-3'-phosphate
  modified_base 16: mod_base = OTHER; note = 2'-fluoroadenosine-3'-phosphate
  modified_base 17: mod_base = OTHER; note = 2'-O-methyluridine-3'-phosphate
  modified_base 18: mod_base = OTHER; note = 2'-O-methyladenosine-3'-phosphate
  modified_base 19: mod_base = OTHER; note = 2'-O-methyluridine-3'-phosphate
  modified_base 20: mod_base = OTHER; note = 2'-O-methylcytidine-3'-phosphate
  modified_base 21: mod_base = OTHER; note = 2'-O-methyluridine-3'-phosphorothioate
  modified_base 22: mod_base = OTHER; note = 2'-O-methyluridine-3'-phosphorothioate
  modified_base 23: mod_base = OTHER; note = 2'-O-methylcytidine-3'-phosphate
cttctcagccatttgatatcttc

SEQ ID NO: 2866 - RNA, 21 nt, synthetic construct
  misc_feature 1..21: note = Description of Artificial Sequence: Synthetic oligonucleotide
  source 1..21: mol_type = other RNA
  modified_base 1: mod_base = OTHER; note = 2'-O-methylguanosine-3'- phosphorothioate
  modified_base 2: mod_base = OTHER; note = 2'-O-methyladenosine-3'- phosphorothioate
  modified_base 3: mod_base = OTHER; note = 2'-O-methyladenosine-3'-phosphate
  modified_base 4: mod_base = OTHER; note = 2'-O-methyladenosine-3'-phosphate
  modified_base 5: mod_base = OTHER; note = 2'-O-methylguanosine-3'-phosphate
  modified_base 6: mod_base = OTHER; note = 2'-O-methyluridine-3'-phosphate
  modified_base 7: mod_base = OTHER; note = 2'-fluorocytidine-3'-phosphate
  modified_base 8: mod_base = OTHER; note = 2'-O-methyladenosine-3'-phosphate
  modified_base 9: mod_base = OTHER; note = 2'-fluorouridine-3'-phosphate
  modified_base 10: mod_base = OTHER; note = 2'-fluorocytidine-3'-phosphate
  modified_base 11: mod_base = OTHER; note = 2'-fluoroguanosine-3'-phosphate
  modified_base 12: mod_base = OTHER; note = 2'-O-methyladenosine-3'-phosphate
  modified_base 13: mod_base = OTHER; note = 2'-O-methylcytidine-3'-phosphate
  modified_base 14: mod_base = OTHER; note = 2'-O-methyladenosine-3'-phosphate
  modified_base 15: mod_base = OTHER; note = 2'-O-methyladenosine-3'-phosphate
  modified_base 16: mod_base = OTHER; note = 2'-O-methylguanosine-3'-phosphate
  modified_base 17: mod_base = OTHER; note = 2'-O-methyladenosine-3'-phosphate
  modified_base 18: mod_base = OTHER; note = 2'-O-methylcytidine-3'-phosphate
  modified_base 19: mod_base = OTHER; note = 2'-O-methyladenosine-3'-phosphate
  modified_base 20: mod_base = OTHER; note = 2'-O-methyluridine-3'-phosphate
  modified_base 21: mod_base = OTHER; note = 2'-O-methyluridine-3'-phosphate attached to N-[tris(N-acetylgalactosamine-alkyl)-amidodecanoyl)]-4-hydr oxyprolinol Hyp-(N-acetylgalactosamine-alkyl)3
gaaagtcatcgacaagacatt

SEQ ID NO: 2867 - RNA, 23 nt, synthetic construct
  misc_feature 1..23: note = Description of Artificial Sequence: Synthetic oligonucleotide
  source 1..23: mol_type = other RNA
  modified_base 1: mod_base = OTHER; note = 2'-O-methyladenosine-3'- phosphorothioate
  modified_base 2: mod_base = OTHER; note = 2'-fluoroadenosine-3'-phosphorothioate
  modified_base 3: mod_base = OTHER; note = 2'-O-methyluridine-3'-phosphate
  modified_base 4: mod_base = OTHER; note = 2'-O-methylguanosine-3'-phosphate
  modified_base 5: mod_base = OTHER; note = 2'-O-methyluridine-3'-phosphate
  modified_base 6: mod_base = OTHER; note = 2'-fluorocytidine-3'-phosphate
  modified_base 7: mod_base = OTHER; note = 2'-O-methyluridine-3'-phosphate
  modified_base 8: mod_base = OTHER; note = 2'-fluorouridine-3'-phosphate
  modified_base 9: mod_base = OTHER; note = 2'-fluoroguanosine-3'-phosphate
  modified_base 10: mod_base = OTHER; note = 2'-O-methyluridine-3'-phosphate
  modified_base 11: mod_base = OTHER; note = 2'-O-methylcytidine-3'-phosphate
  modified_base 12: mod_base = OTHER; note = 2'-O-methylguanosine-3'-phosphate
  modified_base 13: mod_base = OTHER; note = 2'-O-methyladenosine-3'-phosphate
  modified_base 14: mod_base = OTHER; note = 2'-fluorouridine-3'-phosphate
  modified_base 15: mod_base = OTHER; note = 2'-O-methylguanosine-3'-phosphate
  modified_base 16: mod_base = OTHER; note = 2'-fluoroadenosine-3'-phosphate
  modified_base 17: mod_base = OTHER; note = 2'-O-methylcytidine-3'-phosphate
  modified_base 18: mod_base = OTHER; note = 2'-O-methyluridine-3'-phosphate
  modified_base 19: mod_base = OTHER; note = 2'-O-methyluridine-3'-phosphate
  modified_base 20: mod_base = OTHER; note = 2'-O-methyluridine-3'-phosphate
  modified_base 21: mod_base = OTHER; note = 2'-O-methylcytidine-3'- phosphorothioate
  modified_base 22: mod_base = OTHER; note = 2'-O-methyladenosine-3'- phosphorothioate
  modified_base 23: mod_base = OTHER; note = 2'-O-methylcytidine-3'-phosphate
aatgtcttgtcgatgactttcac

SEQ ID NO: 2868 - RNA, 21 nt, synthetic construct
  misc_feature 1..21: note = Description of Artificial Sequence: Synthetic oligonucleotide
  source 1..21: mol_type = other RNA
  modified_base 1: mod_base = OTHER; note = 2'-O-methyladenosine-3'- phosphorothioate
  modified_base 2: mod_base = OTHER; note = 2'-O-methyladenosine-3'- phosphorothioate
  modified_base 3: mod_base = OTHER; note = 2'-O-methyladenosine-3'-phosphate
  modified_base 4: mod_base = OTHER; note = 2'-O-methylguanosine-3'-phosphate
  modified_base 5: mod_base = OTHER; note = 2'-O-methyluridine-3'-phosphate
  modified_base 6: mod_base = OTHER; note = 2'-O-methylcytidine-3'-phosphate
  modified_base 7: mod_base = OTHER; note = 2'-fluoroadenosine-3'-phosphate
  modified_base 8: mod_base = OTHER; note = 2'-O-methyluridine-3'-phosphate
  modified_base 9: mod_base = OTHER; note = 2'-fluorocytidine-3'-phosphate
  modified_base 10: mod_base = OTHER; note = 2'-fluoroguanosine-3'-phosphate
  modified_base 11: mod_base = OTHER; note = 2'-fluoroadenosine-3'-phosphate
  modified_base 12: mod_base = OTHER; note = 2'-O-methylcytidine-3'-phosphate
  modified_base 13: mod_base = OTHER; note = 2'-O-methyladenosine-3'-phosphate
  modified_base 14: mod_base = OTHER; note = 2'-O-methyladenosine-3'-phosphate
  modified_base 15: mod_base = OTHER; note = 2'-O-methylguanosine-3'-phosphate
  modified_base 16: mod_base = OTHER; note = 2'-O-methyladenosine-3'-phosphate
  modified_base 17: mod_base = OTHER; note = 2'-O-methylcytidine-3'-phosphate
  modified_base 18: mod_base = OTHER; note = 2'-O-methyladenosine-3'-phosphate
  modified_base 19: mod_base = OTHER; note = 2'-O-methyluridine-3'-phosphate
  modified_base 20: mod_base = OTHER; note = 2'-O-methyluridine-3'-phosphate
  modified_base 21: mod_base = OTHER; note = 2'-O-methylguanosine-3'-phosphate attached to N-[tris(N-acetylgalactosamine-alkyl)-amidodecanoyl)]-4-hydr oxyprolinol Hyp-(N-acetylgalactosamine-alkyl)3
aaagtcatcgacaagacattg

SEQ ID NO: 2869 - RNA, 23 nt, synthetic construct
  misc_feature 1..23: note = Description of Artificial Sequence: Synthetic oligonucleotide
  source 1..23: mol_type = other RNA
  modified_base 1: mod_base = OTHER; note = 2'-O-methylcytidine-3'- phosphorothioate
  modified_base 2: mod_base = OTHER; note = 2'-fluoroadenosine-3'-phosphorothioate
  modified_base 3: mod_base = OTHER; note = 2'-O-methyladenosine-3'-phosphate
  modified_base 4: mod_base = OTHER; note = 2'-O-methyluridine-3'-phosphate
  modified_base 5: mod_base = OTHER; note = 2'-O-methylguanosine-3'-phosphate
  modified_base 6: mod_base = OTHER; note = 2'-fluorouridine-3'-phosphate
  modified_base 7: mod_base = OTHER; note = 2'-O-methylcytidine-3'-phosphate
  modified_base 8: mod_base = OTHER; note = 2'-fluorouridine-3'-phosphate
  modified_base 9: mod_base = OTHER; note = 2'-fluorouridine-3'-phosphate
  modified_base 10: mod_base = OTHER; note = 2'-O-methylguanosine-3'-phosphate
  modified_base 11: mod_base = OTHER; note = 2'-O-methyluridine-3'-phosphate
  modified_base 12: mod_base = OTHER; note = 2'-O-methylcytidine-3'-phosphate
  modified_base 13: mod_base = OTHER; note = 2'-O-methylguanosine-3'-phosphate
  modified_base 14: mod_base = OTHER; note = 2'-fluoroadenosine-3'-phosphate
  modified_base 15: mod_base = OTHER; note = 2'-O-methyluridine-3'-phosphate
  modified_base 16: mod_base = OTHER; note = 2'-fluoroguanosine-3'-phosphate
  modified_base 17: mod_base = OTHER; note = 2'-O-methyladenosine-3'-phosphate
  modified_base 18: mod_base = OTHER; note = 2'-O-methylcytidine-3'-phosphate
  modified_base 19: mod_base = OTHER; note = 2'-O-methyluridine-3'-phosphate
  modified_base 20: mod_base = OTHER; note = 2'-O-methyluridine-3'-phosphate
  modified_base 21: mod_base = OTHER; note = 2'-O-methyluridine-3'-phosphorothioate
  modified_base 22: mod_base = OTHER; note = 2'-O-methylcytidine-3'- phosphorothioate
  modified_base 23: mod_base = OTHER; note = 2'-O-methyladenosine-3'-phosphate
caatgtcttgtcgatgactttca

SEQ ID NO: 2870 - RNA, 21 nt, synthetic construct
  misc_feature 1..21: note = Description of Artificial Sequence: Synthetic oligonucleotide
  source 1..21: mol_type = other RNA
  modified_base 1: mod_base = OTHER; note = 2'-O-methyladenosine-3'- phosphorothioate
  modified_base 2: mod_base = OTHER; note = 2'-O-methyluridine-3'-phosphorothioate
  modified_base 3: mod_base = OTHER; note = 2'-O-methylguanosine-3'-phosphate
  modified_base 4: mod_base = OTHER; note = 2'-O-methyluridine-3'-phosphate
  modified_base 5: mod_base = OTHER; note = 2'-O-methylguanosine-3'-phosphate
  modified_base 6: mod_base = OTHER; note = 2'-O-methyladenosine-3'-phosphate
  modified_base 7: mod_base = OTHER; note = 2'-fluoroadenosine-3'-phosphate
  modified_base 8: mod_base = OTHER; note = 2'-O-methyladenosine-3'-phosphate
  modified_base 9: mod_base = OTHER; note = 2'-fluoroguanosine-3'-phosphate
  modified_base 10: mod_base = OTHER; note = 2'-fluorouridine-3'-phosphate
  modified_base 11: mod_base = OTHER; note = 2'-fluorocytidine-3'-phosphate
  modified_base 12: mod_base = OTHER; note = 2'-O-methyladenosine-3'-phosphate
  modified_base 13: mod_base = OTHER; note = 2'-O-methyluridine-3'-phosphate
  modified_base 14: mod_base = OTHER; note = 2'-O-methylcytidine-3'-phosphate
  modified_base 15: mod_base = OTHER; note = 2'-O-methylguanosine-3'-phosphate
  modified_base 16: mod_base = OTHER; note = 2'-O-methyladenosine-3'-phosphate
  modified_base 17: mod_base = OTHER; note = 2'-O-methylcytidine-3'-phosphate
  modified_base 18: mod_base = OTHER; note = 2'-O-methyladenosine-3'-phosphate
  modified_base 19: mod_base = OTHER; note = 2'-O-methyladenosine-3'-phosphate
  modified_base 20: mod_base = OTHER; note = 2'-O-methylguanosine-3'-phosphate
  modified_base 21: mod_base = OTHER; note = 2'-O-methyladenosine-3'-phosphate attached to N-[tris(N-acetylgalactosamine-alkyl)-amidodecanoyl)]-4-hydr oxyprolinol Hyp-(N-acetylgalactosamine-alkyl)3
atgtgaaagtcatcgacaaga

SEQ ID NO: 2871 - RNA, 23 nt, synthetic construct
  misc_feature 1..23: note = Description of Artificial Sequence: Synthetic oligonucleotide
  source 1..23: mol_type = other RNA
  modified_base 1: mod_base = OTHER; note = 2'-O-methyluridine-3'-phosphorothioate
  modified_base 2: mod_base = OTHER; note = 2'-fluorocytidine-3'-phosphorothioate
  modified_base 3: mod_base = OTHER; note = 2'-O-methyluridine-3'-phosphate
  modified_base 4: mod_base = OTHER; note = 2'-O-methyluridine-3'-phosphate
  modified_base 5: mod_base = OTHER; note = 2'-O-methylguanosine-3'-phosphate
  modified_base 6: mod_base = OTHER; note = 2'-fluorouridine-3'-phosphate
  modified_base 7: mod_base = OTHER; note = 2'-O-methylcytidine-3'-phosphate
  modified_base 8: mod_base = OTHER; note = 2'-fluoroguanosine-3'-phosphate
  modified_base 9: mod_base = OTHER; note = 2'-fluoroadenosine-3'-phosphate
  modified_base 10: mod_base = OTHER; note = 2'-O-methyluridine-3'-phosphate
  modified_base 11: mod_base = OTHER; note = 2'-O-methylguanosine-3'-phosphate
  modified_base 12: mod_base = OTHER; note = 2'-O-methyladenosine-3'-phosphate
  modified_base 13: mod_base = OTHER; note = 2'-O-methylcytidine-3'-phosphate
  modified_base 14: mod_base = OTHER; note = 2'-fluorouridine-3'-phosphate
  modified_base 15: mod_base = OTHER; note = 2'-O-methyluridine-3'-phosphate
  modified_base 16: mod_base = OTHER; note = 2'-fluorouridine-3'-phosphate
  modified_base 17: mod_base = OTHER; note = 2'-O-methylcytidine-3'-phosphate
  modified_base 18: mod_base = OTHER; note = 2'-O-methyladenosine-3'-phosphate
  modified_base 19: mod_base = OTHER; note = 2'-O-methylcytidine-3'-phosphate
  modified_base 20: mod_base = OTHER; note = 2'-O-methyladenosine-3'-phosphate
  modified_base 21: mod_base = OTHER; note = 2'-O-methyluridine-3'-phosphorothioate
  modified_base 22: mod_base = OTHER; note = 2'-O-methyluridine-3'-phosphorothioate
  modified_base 23: mod_base = OTHER; note = 2'-O-methylcytidine-3'-phosphate
tcttgtcgatgactttcacattc

SEQ ID NO: 2872 - RNA, 21 nt, synthetic construct
  misc_feature 1..21: note = Description of Artificial Sequence: Synthetic oligonucleotide
  source 1..21: mol_type = other RNA
  modified_base 1: mod_base = OTHER; note = 2'-O-methyladenosine-3'- phosphorothioate
  modified_base 2: mod_base = OTHER; note = 2'-O-methyladenosine-3'- phosphorothioate
  modified_base 3: mod_base = OTHER; note = 2'-O-methyluridine-3'-phosphate
  modified_base 4: mod_base = OTHER; note = 2'-O-methylguanosine-3'-phosphate
  modified_base 5: mod_base = OTHER; note = 2'-O-methyluridine-3'-phosphate
  modified_base 6: mod_base = OTHER; note = 2'-O-methylguanosine-3'-phosphate
  modified_base 7: mod_base = OTHER; note = 2'-fluoroadenosine-3'-phosphate
  modified_base 8: mod_base = OTHER; note = 2'-O-methyladenosine-3'-phosphate
  modified_base 9: mod_base = OTHER; note = 2'-fluoroadenosine-3'-phosphate
  modified_base 10: mod_base = OTHER; note = 2'-fluoroguanosine-3'-phosphate
  modified_base 11: mod_base = OTHER; note = 2'-fluorouridine-3'-phosphate
  modified_base 12: mod_base = OTHER; note = 2'-O-methylcytidine-3'-phosphate
  modified_base 13: mod_base = OTHER; note = 2'-O-methyladenosine-3'-phosphate
  modified_base 14: mod_base = OTHER; note = 2'-O-methyluridine-3'-phosphate
  modified_base 15: mod_base = OTHER; note = 2'-O-methylcytidine-3'-phosphate
  modified_base 16: mod_base = OTHER; note = 2'-O-methylguanosine-3'-phosphate
  modified_base 17: mod_base = OTHER; note = 2'-O-methyladenosine-3'-phosphate
  modified_base 18: mod_base = OTHER; note = 2'-O-methylcytidine-3'-phosphate
  modified_base 19: mod_base = OTHER; note = 2'-O-methyladenosine-3'-phosphate
  modified_base 20: mod_base = OTHER; note = 2'-O-methyladenosine-3'-phosphate
  modified_base 21: mod_base = OTHER; note = 2'-O-methylguanosine-3'-phosphate attached to N-[tris(N-acetylgalactosamine-alkyl)-amidodecanoyl)]-4-hydr oxyprolinol Hyp-(N-acetylgalactosamine-alkyl)3
aatgtgaaagtcatcgacaag

SEQ ID NO: 2873 - RNA, 23 nt, synthetic construct
  misc_feature 1..23: note = Description of Artificial Sequence: Synthetic oligonucleotide
  source 1..23: mol_type = other RNA
  modified_base 1: mod_base = OTHER; note = 2'-O-methylcytidine-3'- phosphorothioate
  modified_base 2: mod_base = OTHER; note = 2'-fluorouridine -3'-phosphorothioate
  modified_base 3: mod_base = OTHER; note = 2'-O-methyluridine-3'-phosphate
  modified_base 4: mod_base = OTHER; note = 2'-O-methylguanosine-3'-phosphate
  modified_base 5: mod_base = OTHER; note = 2'-O-methyluridine-3'-phosphate
  modified_base 6: mod_base = OTHER; note = 2'-fluorocytidine-3'-phosphate
  modified_base 7: mod_base = OTHER; note = 2'-O-methylguanosine-3'-phosphate
  modified_base 8: mod_base = OTHER; note = 2'-fluoroadenosine-3'-phosphate
  modified_base 9: mod_base = OTHER; note = 2'-fluorouridine-3'-phosphate
  modified_base 10: mod_base = OTHER; note = 2'-O-methylguanosine-3'-phosphate
  modified_base 11: mod_base = OTHER; note = 2'-O-methyladenosine-3'-phosphate
  modified_base 12: mod_base = OTHER; note = 2'-O-methylcytidine-3'-phosphate
  modified_base 13: mod_base = OTHER; note = 2'-O-methyluridine-3'-phosphate
  modified_base 14: mod_base = OTHER; note = 2'-fluorouridine-3'-phosphate
  modified_base 15: mod_base = OTHER; note = 2'-O-methyluridine-3'-phosphate
  modified_base 16: mod_base = OTHER; note = 2'-fluorocytidine-3'-phosphate
  modified_base 17: mod_base = OTHER; note = 2'-O-methyladenosine-3'-phosphate
  modified_base 18: mod_base = OTHER; note = 2'-O-methylcytidine-3'-phosphate
  modified_base 19: mod_base = OTHER; note = 2'-O-methyladenosine-3'-phosphate
  modified_base 20: mod_base = OTHER; note = 2'-O-methyluridine-3'-phosphate
  modified_base 21: mod_base = OTHER; note = 2'-O-methyluridine-3'-phosphorothioate
  modified_base 22: mod_base = OTHER; note = 2'-O-methylcytidine-3'- phosphorothioate
  modified_base 23: mod_base = OTHER; note = 2'-O-methyluridine-3'-phosphate
cttgtcgatgactttcacattct

SEQ ID NO: 2874 - RNA, 21 nt, synthetic construct
  misc_feature 1..21: note = Description of Artificial Sequence: Synthetic oligonucleotide
  source 1..21: mol_type = other RNA
  modified_base 1: mod_base = OTHER; note = 2'-O-methylguanosine-3'- phosphorothioate
  modified_base 2: mod_base = OTHER; note = 2'-O-methylguanosine-3'- phosphorothioate
  modified_base 3: mod_base = OTHER; note = 2'-O-methylcytidine-3'-phosphate
  modified_base 4: mod_base = OTHER; note = 2'-O-methyluridine-3'-phosphate
  modified_base 5: mod_base = OTHER; note = 2'-O-methyladenosine-3'-phosphate
  modified_base 6: mod_base = OTHER; note = 2'-O-methyladenosine-3'-phosphate
  modified_base 7: mod_base = OTHER; note = 2'-fluorouridine-3'-phosphate
  modified_base 8: mod_base = OTHER; note = 2'-O-methyluridine-3'-phosphate
  modified_base 9: mod_base = OTHER; note = 2'-fluorouridine-3'-phosphate
  modified_base 10: mod_base = OTHER; note = 2'-fluoroguanosine-3'-phosphate
  modified_base 11: mod_base = OTHER; note = 2'-fluorouridine-3'-phosphate
  modified_base 12: mod_base = OTHER; note = 2'-O-methyladenosine-3'-phosphate
  modified_base 13: mod_base = OTHER; note = 2'-O-methyluridine-3'-phosphate
  modified_base 14: mod_base = OTHER; note = 2'-O-methylcytidine-3'-phosphate
  modified_base 15: mod_base = OTHER; note = 2'-O-methyladenosine-3'-phosphate
  modified_base 16: mod_base = OTHER; note = 2'-O-methyladenosine-3'-phosphate
  modified_base 17: mod_base = OTHER; note = 2'-O-methyluridine-3'-phosphate
  modified_base 18: mod_base = OTHER; note = 2'-O-methylguanosine-3'-phosphate
  modified_base 19: mod_base = OTHER; note = 2'-O-methyladenosine-3'-phosphate
  modified_base 20: mod_base = OTHER; note = 2'-O-methyluridine-3'-phosphate
  modified_base 21: mod_base = OTHER; note = 2'-O-methyluridine-3'-phosphate attached to N-[tris(N-acetylgalactosamine-alkyl)-amidodecanoyl)]-4-hydr oxyprolinol Hyp-(N-acetylgalactosamine-alkyl)3
ggctaatttgtatcaatgatt

SEQ ID NO: 2875 - RNA, 23 nt, synthetic construct
  misc_feature 1..23: note = Description of Artificial Sequence: Synthetic oligonucleotide
  source 1..23: mol_type = other RNA
  modified_base 1: mod_base = OTHER; note = 2'-O-methyladenosine-3'- phosphorothioate
  modified_base 2: mod_base = OTHER; note = 2'-fluoroadenosine-3'-phosphorothioate
  modified_base 3: mod_base = OTHER; note = 2'-O-methyluridine-3'-phosphate
  modified_base 4: mod_base = OTHER; note = 2'-O-methylcytidine-3'-phosphate
  modified_base 5: mod_base = OTHER; note = 2'-O-methyladenosine-3'-phosphate
  modified_base 6: mod_base = OTHER; note = 2'-fluorouridine-3'-phosphate
  modified_base 7: mod_base = OTHER; note = 2'-O-methyluridine-3'-phosphate
  modified_base 8: mod_base = OTHER; note = 2'-fluoroguanosine-3'-phosphate
  modified_base 9: mod_base = OTHER; note = 2'-fluoroadenosine-3'-phosphate
  modified_base 10: mod_base = OTHER; note = 2'-O-methyluridine-3'-phosphate
  modified_base 11: mod_base = OTHER; note = 2'-O-methyladenosine-3'-phosphate
  modified_base 12: mod_base = OTHER; note = 2'-O-methylcytidine-3'-phosphate
  modified_base 13: mod_base = OTHER; note = 2'-O-methyladenosine-3'-phosphate
  modified_base 14: mod_base = OTHER; note = 2'-fluoroadenosine-3'-phosphate
  modified_base 15: mod_base = OTHER; note = 2'-O-methyladenosine-3'-phosphate
  modified_base 16: mod_base = OTHER; note = 2'-fluorouridine-3'-phosphate
  modified_base 17: mod_base = OTHER; note = 2'-O-methyluridine-3'-phosphate
  modified_base 18: mod_base = OTHER; note = 2'-O-methyladenosine-3'-phosphate
  modified_base 19: mod_base = OTHER; note = 2'-O-methylguanosine-3'-phosphate
  modified_base 20: mod_base = OTHER; note = 2'-O-methylcytidine-3'-phosphate
  modified_base 21: mod_base = OTHER; note = 2'-O-methylcytidine-3'- phosphorothioate
  modified_base 22: mod_base = OTHER; note = 2'-O-methylguanosine-3'- phosphorothioate
  modified_base 23: mod_base = OTHER; note = 2'-O-methylguanosine-3'-phosphate
aatcattgatacaaattagccgg

SEQ ID NO: 2876 - RNA, 21 nt, synthetic construct
  misc_feature 1..21: note = Description of Artificial Sequence: Synthetic oligonucleotide
  source 1..21: mol_type = other RNA
  modified_base 1: mod_base = OTHER; note = 2'-O-methylguanosine-3'- phosphorothioate
  modified_base 2: mod_base = OTHER; note = 2'-O-methylcytidine-3'- phosphorothioate
  modified_base 3: mod_base = OTHER; note = 2'-O-methyluridine-3'-phosphate
  modified_base 4: mod_base = OTHER; note = 2'-O-methyladenosine-3'-phosphate
  modified_base 5: mod_base = OTHER; note = 2'-O-methyladenosine-3'-phosphate
  modified_base 6: mod_base = OTHER; note = 2'-O-methyluridine-3'-phosphate
  modified_base 7: mod_base = OTHER; note = 2'-fluorouridine-3'-phosphate
  modified_base 8: mod_base = OTHER; note = 2'-O-methyluridine-3'-phosphate
  modified_base 9: mod_base = OTHER; note = 2'-fluoroguanosine-3'-phosphate
  modified_base 10: mod_base = OTHER; note = 2'-fluorouridine-3'-phosphate
  modified_base 11: mod_base = OTHER; note = 2'-fluoroadenosine-3'-phosphate
  modified_base 12: mod_base = OTHER; note = 2'-O-methyluridine-3'-phosphate
  modified_base 13: mod_base = OTHER; note = 2'-O-methylcytidine-3'-phosphate
  modified_base 14: mod_base = OTHER; note = 2'-O-methyladenosine-3'-phosphate
  modified_base 15: mod_base = OTHER; note = 2'-O-methyladenosine-3'-phosphate
  modified_base 16: mod_base = OTHER; note = 2'-O-methyluridine-3'-phosphate
  modified_base 17: mod_base = OTHER; note = 2'-O-methylguanosine-3'-phosphate
  modified_base 18: mod_base = OTHER; note = 2'-O-methyladenosine-3'-phosphate
  modified_base 19: mod_base = OTHER; note = 2'-O-methyluridine-3'-phosphate
  modified_base 20: mod_base = OTHER; note = 2'-O-methyluridine-3'-phosphate
  modified_base 21: mod_base = OTHER; note = 2'-O-methyladenosine-3'-phosphate attached to N-[tris(N-acetylgalactosamine-alkyl)-amidodecanoyl)]-4-hydr oxyprolinol Hyp-(N-acetylgalactosamine-alkyl)3
gctaatttgtatcaatgatta

SEQ ID NO: 2877 - RNA, 23 nt, synthetic construct
  misc_feature 1..23: note = Description of Artificial Sequence: Synthetic oligonucleotide
  source 1..23: mol_type = other RNA
  modified_base 1: mod_base = OTHER; note = 2'-O-methyluridine-3'-phosphorothioate
  modified_base 2: mod_base = OTHER; note = 2'-fluoroadenosine-3'-phosphorothioate
  modified_base 3: mod_base = OTHER; note = 2'-O-methyladenosine-3'-phosphate
  modified_base 4: mod_base = OTHER; note = 2'-O-methyluridine-3'-phosphate
  modified_base 5: mod_base = OTHER; note = 2'-O-methylcytidine-3'-phosphate
  modified_base 6: mod_base = OTHER; note = 2'-fluoroadenosine-3'-phosphate
  modified_base 7: mod_base = OTHER; note = 2'-O-methyluridine-3'-phosphate
  modified_base 8: mod_base = OTHER; note = 2'-fluorouridine-3'-phosphate
  modified_base 9: mod_base = OTHER; note = 2'-fluoroguanosine-3'-phosphate
  modified_base 10: mod_base = OTHER; note = 2'-O-methyladenosine-3'-phosphate
  modified_base 11: mod_base = OTHER; note = 2'-O-methyluridine-3'-phosphate
  modified_base 12: mod_base = OTHER; note = 2'-O-methyladenosine-3'-phosphate
  modified_base 13: mod_base = OTHER; note = 2'-O-methylcytidine-3'-phosphate
  modified_base 14: mod_base = OTHER; note = 2'-fluoroadenosine-3'-phosphate
  modified_base 15: mod_base = OTHER; note = 2'-O-methyladenosine-3'-phosphate
  modified_base 16: mod_base = OTHER; note = 2'-fluoroadenosine-3'-phosphate
  modified_base 17: mod_base = OTHER; note = 2'-O-methyluridine-3'-phosphate
  modified_base 18: mod_base = OTHER; note = 2'-O-methyluridine-3'-phosphate
  modified_base 19: mod_base = OTHER; note = 2'-O-methyladenosine-3'-phosphate
  modified_base 20: mod_base = OTHER; note = 2'-O-methylguanosine-3'-phosphate
  modified_base 21: mod_base = OTHER; note = 2'-O-methylcytidine-3'- phosphorothioate
  modified_base 22: mod_base = OTHER; note = 2'-O-methylcytidine-3'- phosphorothioate
  modified_base 23: mod_base = OTHER; note = 2'-O-methylguanosine-3'-phosphate
taatcattgatacaaattagccg

SEQ ID NO: 2878 - RNA, 21 nt, synthetic construct
  misc_feature 1..21: note = Description of Artificial Sequence: Synthetic oligonucleotide
  source 1..21: mol_type = other RNA
  modified_base 1: mod_base = OTHER; note = 2'-O-methylcytidine-3'- phosphorothioate
  modified_base 2: mod_base = OTHER; note = 2'-O-methylcytidine-3'- phosphorothioate
  modified_base 3: mod_base = OTHER; note = 2'-O-methylcytidine-3'-phosphate
  modified_base 4: mod_base = OTHER; note = 2'-O-methylcytidine-3'-phosphate
  modified_base 5: mod_base = OTHER; note = 2'-O-methylguanosine-3'-phosphate
  modified_base 6: mod_base = OTHER; note = 2'-O-methylguanosine-3'-phosphate
  modified_base 7: mod_base = OTHER; note = 2'-fluorocytidine-3'-phosphate
  modified_base 8: mod_base = OTHER; note = 2'-O-methyluridine-3'-phosphate
  modified_base 9: mod_base = OTHER; note = 2'-fluoroadenosine-3'-phosphate
  modified_base 10: mod_base = OTHER; note = 2'-fluoroadenosine-3'-phosphate
  modified_base 11: mod_base = OTHER; note = 2'-fluorouridine-3'-phosphate
  modified_base 12: mod_base = OTHER; note = 2'-O-methyluridine-3'-phosphate
  modified_base 13: mod_base = OTHER; note = 2'-O-methyluridine-3'-phosphate
  modified_base 14: mod_base = OTHER; note = 2'-O-methylguanosine-3'-phosphate
  modified_base 15: mod_base = OTHER; note = 2'-O-methyluridine-3'-phosphate
  modified_base 16: mod_base = OTHER; note = 2'-O-methyladenosine-3'-phosphate
  modified_base 17: mod_base = OTHER; note = 2'-O-methyluridine-3'-phosphate
  modified_base 18: mod_base = OTHER; note = 2'-O-methylcytidine-3'-phosphate
  modified_base 19: mod_base = OTHER; note = 2'-O-methyladenosine-3'-phosphate
  modified_base 20: mod_base = OTHER; note = 2'-O-methyladenosine-3'-phosphate
  modified_base 21: mod_base = OTHER; note = 2'-O-methyluridine-3'-phosphate attached to N-[tris(N-acetylgalactosamine-alkyl)-amidodecanoyl)]-4-hydr oxyprolinol Hyp-(N-acetylgalactosamine-alkyl)3
ccccggctaatttgtatcaat

SEQ ID NO: 2879 - RNA, 23 nt, synthetic construct
  misc_feature 1..23: note = Description of Artificial Sequence: Synthetic oligonucleotide
  source 1..23: mol_type = other RNA
  modified_base 1: mod_base = OTHER; note = 2'-O-methyladenosine-3'- phosphorothioate
  modified_base 2: mod_base = OTHER; note = 2'-fluorouridine -3'-phosphorothioate
  modified_base 3: mod_base = OTHER; note = 2'-O-methyluridine-3'-phosphate
  modified_base 4: mod_base = OTHER; note = 2'-O-methylguanosine-3'-phosphate
  modified_base 5: mod_base = OTHER; note = 2'-O-methyladenosine-3'-phosphate
  modified_base 6: mod_base = OTHER; note = 2'-fluorouridine-3'-phosphate
  modified_base 7: mod_base = OTHER; note = 2'-O-methyladenosine-3'-phosphate
  modified_base 8: mod_base = OTHER; note = 2'-fluorocytidine-3'-phosphate
  modified_base 9: mod_base = OTHER; note = 2'-fluoroadenosine-3'-phosphate
  modified_base 10: mod_base = OTHER; note = 2'-O-methyladenosine-3'-phosphate
  modified_base 11: mod_base = OTHER; note = 2'-O-methyladenosine-3'-phosphate
  modified_base 12: mod_base = OTHER; note = 2'-O-methyluridine-3'-phosphate
  modified_base 13: mod_base = OTHER; note = 2'-O-methyluridine-3'-phosphate
  modified_base 14: mod_base = OTHER; note = 2'-fluoroadenosine-3'-phosphate
  modified_base 15: mod_base = OTHER; note = 2'-O-methylguanosine-3'-phosphate
  modified_base 16: mod_base = OTHER; note = 2'-fluorocytidine-3'-phosphate
  modified_base 17: mod_base = OTHER; note = 2'-O-methylcytidine-3'-phosphate
  modified_base 18: mod_base = OTHER; note = 2'-O-methylguanosine-3'-phosphate
  modified_base 19: mod_base = OTHER; note = 2'-O-methylguanosine-3'-phosphate
  modified_base 20: mod_base = OTHER; note = 2'-O-methylguanosine-3'-phosphate
  modified_base 21: mod_base = OTHER; note = 2'-O-methylguanosine-3'- phosphorothioate
  modified_base 22: mod_base = OTHER; note = 2'-O-methylguanosine-3'- phosphorothioate
  modified_base 23: mod_base = OTHER; note = 2'-O-methyladenosine-3'-phosphate
attgatacaaattagccggggga

SEQ ID NO: 2880 - RNA, 21 nt, synthetic construct
  misc_feature 1..21: note = Description of Artificial Sequence: Synthetic oligonucleotide
  source 1..21: mol_type = other RNA
  modified_base 1: mod_base = OTHER; note = 2'-O-methylcytidine-3'- phosphorothioate
  modified_base 2: mod_base = OTHER; note = 2'-O-methylcytidine-3'- phosphorothioate
  modified_base 3: mod_base = OTHER; note = 2'-O-methylcytidine-3'-phosphate
  modified_base 4: mod_base = OTHER; note = 2'-O-methylcytidine-3'-phosphate
  modified_base 5: mod_base = OTHER; note = 2'-O-methylcytidine-3'-phosphate
  modified_base 6: mod_base = OTHER; note = 2'-O-methylguanosine-3'-phosphate
  modified_base 7: mod_base = OTHER; note = 2'-fluoroguanosine-3'-phosphate
  modified_base 8: mod_base = OTHER; note = 2'-O-methylcytidine-3'-phosphate
  modified_base 9: mod_base = OTHER; note = 2'-fluorouridine-3'-phosphate
  modified_base 10: mod_base = OTHER; note = 2'-fluoroadenosine-3'-phosphate
  modified_base 11: mod_base = OTHER; note = 2'-fluoroadenosine-3'-phosphate
  modified_base 12: mod_base = OTHER; note = 2'-O-methyluridine-3'-phosphate
  modified_base 13: mod_base = OTHER; note = 2'-O-methyluridine-3'-phosphate
  modified_base 14: mod_base = OTHER; note = 2'-O-methyluridine-3'-phosphate
  modified_base 15: mod_base = OTHER; note = 2'-O-methylguanosine-3'-phosphate
  modified_base 16: mod_base = OTHER; note = 2'-O-methyluridine-3'-phosphate
  modified_base 17: mod_base = OTHER; note = 2'-O-methyladenosine-3'-phosphate
  modified_base 18: mod_base = OTHER; note = 2'-O-methyluridine-3'-phosphate
  modified_base 19: mod_base = OTHER; note = 2'-O-methylcytidine-3'-phosphate
  modified_base 20: mod_base = OTHER; note = 2'-O-methyladenosine-3'-phosphate
  modified_base 21: mod_base = OTHER; note = 2'-O-methyladenosine-3'-phosphate attached to N-[tris(N-acetylgalactosamine-alkyl)-amidodecanoyl)]-4-hydr oxyprolinol Hyp-(N-acetylgalactosamine-alkyl)3
cccccggctaatttgtatcaa

SEQ ID NO: 2881 - RNA, 23 nt, synthetic construct
  misc_feature 1..23: note = Description of Artificial Sequence: Synthetic oligonucleotide
  source 1..23: mol_type = other RNA
  modified_base 1: mod_base = OTHER; note = 2'-O-methyluridine-3'-phosphorothioate
  modified_base 2: mod_base = OTHER; note = 2'-fluorouridine -3'-phosphorothioate
  modified_base 3: mod_base = OTHER; note = 2'-O-methylguanosine-3'-phosphate
  modified_base 4: mod_base = OTHER; note = 2'-O-methyladenosine-3'-phosphate
  modified_base 5: mod_base = OTHER; note = 2'-O-methyluridine-3'-phosphate
  modified_base 6: mod_base = OTHER; note = 2'-fluoroadenosine-3'-phosphate
  modified_base 7: mod_base = OTHER; note = 2'-O-methylcytidine-3'-phosphate
  modified_base 8: mod_base = OTHER; note = 2'-fluoroadenosine-3'-phosphate
  modified_base 9: mod_base = OTHER; note = 2'-fluoroadenosine-3'-phosphate
  modified_base 10: mod_base = OTHER; note = 2'-O-methyladenosine-3'-phosphate
  modified_base 11: mod_base = OTHER; note = 2'-O-methyluridine-3'-phosphate
  modified_base 12: mod_base = OTHER; note = 2'-O-methyluridine-3'-phosphate
  modified_base 13: mod_base = OTHER; note = 2'-O-methyladenosine-3'-phosphate
  modified_base 14: mod_base = OTHER; note = 2'-fluoroguanosine-3'-phosphate
  modified_base 15: mod_base = OTHER; note = 2'-O-methylcytidine-3'-phosphate
  modified_base 16: mod_base = OTHER; note = 2'-fluorocytidine-3'-phosphate
  modified_base 17: mod_base = OTHER; note = 2'-O-methylguanosine-3'-phosphate
  modified_base 18: mod_base = OTHER; note = 2'-O-methylguanosine-3'-phosphate
  modified_base 19: mod_base = OTHER; note = 2'-O-methylguanosine-3'-phosphate
  modified_base 20: mod_base = OTHER; note = 2'-O-methylguanosine-3'-phosphate
  modified_base 21: mod_base = OTHER; note = 2'-O-methylguanosine-3'- phosphorothioate
  modified_base 22: mod_base = OTHER; note = 2'-O-methyladenosine-3'- phosphorothioate
  modified_base 23: mod_base = OTHER; note = 2'-O-methylguanosine-3'-phosphate
ttgatacaaattagccgggggag

SEQ ID NO: 2882 - RNA, 21 nt, synthetic construct
  misc_feature 1..21: note = Description of Artificial Sequence: Synthetic oligonucleotide
  source 1..21: mol_type = other RNA
  modified_base 1: mod_base = OTHER; note = 2'-O-methyluridine-3'-phosphorothioate
  modified_base 2: mod_base = OTHER; note = 2'-O-methylguanosine-3'- phosphorothioate
  modified_base 3: mod_base = OTHER; note = 2'-O-methyluridine-3'-phosphate
  modified_base 4: mod_base = OTHER; note = 2'-O-methylcytidine-3'-phosphate
  modified_base 5: mod_base = OTHER; note = 2'-O-methylguanosine-3'-phosphate
  modified_base 6: mod_base = OTHER; note = 2'-O-methyladenosine-3'-phosphate
  modified_base 7: mod_base = OTHER; note = 2'-fluorocytidine-3'-phosphate
  modified_base 8: mod_base = OTHER; note = 2'-O-methyluridine-3'-phosphate
  modified_base 9: mod_base = OTHER; note = 2'-fluorouridine-3'-phosphate
  modified_base 10: mod_base = OTHER; note = 2'-fluorocytidine-3'-phosphate
  modified_base 11: mod_base = OTHER; note = 2'-fluorouridine-3'-phosphate
  modified_base 12: mod_base = OTHER; note = 2'-O-methylguanosine-3'-phosphate
  modified_base 13: mod_base = OTHER; note = 2'-O-methyluridine-3'-phosphate
  modified_base 14: mod_base = OTHER; note = 2'-O-methyluridine-3'-phosphate
  modified_base 15: mod_base = OTHER; note = 2'-O-methyluridine-3'-phosphate
  modified_base 16: mod_base = OTHER; note = 2'-O-methyluridine-3'-phosphate
  modified_base 17: mod_base = OTHER; note = 2'-O-methyladenosine-3'-phosphate
  modified_base 18: mod_base = OTHER; note = 2'-O-methylguanosine-3'-phosphate
  modified_base 19: mod_base = OTHER; note = 2'-O-methylguanosine-3'-phosphate
  modified_base 20: mod_base = OTHER; note = 2'-O-methyladenosine-3'-phosphate
  modified_base 21: mod_base = OTHER; note = 2'-O-methylcytidine-3'-phosphate attached to N-[tris(N-acetylgalactosamine-alkyl)-amidodecanoyl)]-4-hydr oxyprolinol Hyp-(N-acetylgalactosamine-alkyl)3
tgtcgacttctgttttaggac

SEQ ID NO: 2883 - RNA, 23 nt, synthetic construct
  misc_feature 1..23: note = Description of Artificial Sequence: Synthetic oligonucleotide
  source 1..23: mol_type = other RNA
  modified_base 1: mod_base = OTHER; note = 2'-O-methylguanosine-3'- phosphorothioate
  modified_base 2: mod_base = OTHER; note = 2'-fluorouridine -3'-phosphorothioate
  modified_base 3: mod_base = OTHER; note = 2'-O-methylcytidine-3'-phosphate
  modified_base 4: mod_base = OTHER; note = 2'-O-methylcytidine-3'-phosphate
  modified_base 5: mod_base = OTHER; note = 2'-O-methyluridine-3'-phosphate
  modified_base 6: mod_base = OTHER; note = 2'-fluoroadenosine-3'-phosphate
  modified_base 7: mod_base = OTHER; note = 2'-O-methyladenosine-3'-phosphate
  modified_base 8: mod_base = OTHER; note = 2'-fluoroadenosine-3'-phosphate
  modified_base 9: mod_base = OTHER; note = 2'-fluoroadenosine-3'-phosphate
  modified_base 10: mod_base = OTHER; note = 2'-O-methylcytidine-3'-phosphate
  modified_base 11: mod_base = OTHER; note = 2'-O-methyladenosine-3'-phosphate
  modified_base 12: mod_base = OTHER; note = 2'-O-methylguanosine-3'-phosphate
  modified_base 13: mod_base = OTHER; note = 2'-O-methyladenosine-3'-phosphate
  modified_base 14: mod_base = OTHER; note = 2'-fluoroadenosine-3'-phosphate
  modified_base 15: mod_base = OTHER; note = 2'-O-methylguanosine-3'-phosphate
  modified_base 16: mod_base = OTHER; note = 2'-fluorouridine-3'-phosphate
  modified_base 17: mod_base = OTHER; note = 2'-O-methylcytidine-3'-phosphate
  modified_base 18: mod_base = OTHER; note = 2'-O-methylguanosine-3'-phosphate
  modified_base 19: mod_base = OTHER; note = 2'-O-methyladenosine-3'-phosphate
  modified_base 20: mod_base = OTHER; note = 2'-O-methylcytidine-3'-phosphate
  modified_base 21: mod_base = OTHER; note = 2'-O-methyladenosine-3'- phosphorothioate
  modified_base 22: mod_base = OTHER; note = 2'-O-methylguanosine-3'- phosphorothioate
  modified_base 23: mod_base = OTHER; note = 2'-O-methyladenosine-3'-phosphate
gtcctaaaacagaagtcgacaga

SEQ ID NO: 2884 - RNA, 21 nt, synthetic construct
  misc_feature 1..21: note = Description of Artificial Sequence: Synthetic oligonucleotide
  source 1..21: mol_type = other RNA
  modified_base 1: mod_base = OTHER; note = 2'-O-methylguanosine-3'- phosphorothioate
  modified_base 2: mod_base = OTHER; note = 2'-O-methyluridine-3'-phosphorothioate
  modified_base 3: mod_base = OTHER; note = 2'-O-methylcytidine-3'-phosphate
  modified_base 4: mod_base = OTHER; note = 2'-O-methylguanosine-3'-phosphate
  modified_base 5: mod_base = OTHER; note = 2'-O-methyladenosine-3'-phosphate
  modified_base 6: mod_base = OTHER; note = 2'-O-methylcytidine-3'-phosphate
  modified_base 7: mod_base = OTHER; note = 2'-fluorouridine-3'-phosphate
  modified_base 8: mod_base = OTHER; note = 2'-O-methyluridine-3'-phosphate
  modified_base 9: mod_base = OTHER; note = 2'-fluorocytidine-3'-phosphate
  modified_base 10: mod_base = OTHER; note = 2'-fluorouridine-3'-phosphate
  modified_base 11: mod_base = OTHER; note = 2'-fluoroguanosine-3'-phosphate
  modified_base 12: mod_base = OTHER; note = 2'-O-methyluridine-3'-phosphate
  modified_base 13: mod_base = OTHER; note = 2'-O-methyluridine-3'-phosphate
  modified_base 14: mod_base = OTHER; note = 2'-O-methyluridine-3'-phosphate
  modified_base 15: mod_base = OTHER; note = 2'-O-methyluridine-3'-phosphate
  modified_base 16: mod_base = OTHER; note = 2'-O-methyladenosine-3'-phosphate
  modified_base 17: mod_base = OTHER; note = 2'-O-methylguanosine-3'-phosphate
  modified_base 18: mod_base = OTHER; note = 2'-O-methylguanosine-3'-phosphate
  modified_base 19: mod_base = OTHER; note = 2'-O-methyladenosine-3'-phosphate
  modified_base 20: mod_base = OTHER; note = 2'-O-methylcytidine-3'-phosphate
  modified_base 21: mod_base = OTHER; note = 2'-O-methyladenosine-3'-phosphate attached to N-[tris(N-acetylgalactosamine-alkyl)-amidodecanoyl)]-4-hydr oxyprolinol Hyp-(N-acetylgalactosamine-alkyl)3
gtcgacttctgttttaggaca

SEQ ID NO: 2885 - RNA, 23 nt, synthetic construct
  misc_feature 1..23: note = Description of Artificial Sequence: Synthetic oligonucleotide
  source 1..23: mol_type = other RNA
  modified_base 1: mod_base = OTHER; note = 2'-O-methyluridine-3'-phosphorothioate
  modified_base 2: mod_base = OTHER; note = 2'-fluoroguanosine-3'-phosphorothioate
  modified_base 3: mod_base = OTHER; note = 2'-O-methyluridine-3'-phosphate
  modified_base 4: mod_base = OTHER; note = 2'-O-methylcytidine-3'-phosphate
  modified_base 5: mod_base = OTHER; note = 2'-O-methylcytidine-3'-phosphate
  modified_base 6: mod_base = OTHER; note = 2'-fluorouridine-3'-phosphate
  modified_base 7: mod_base = OTHER; note = 2'-O-methyladenosine-3'-phosphate
  modified_base 8: mod_base = OTHER; note = 2'-fluoroadenosine-3'-phosphate
  modified_base 9: mod_base = OTHER; note = 2'-fluoroadenosine-3'-phosphate
  modified_base 10: mod_base = OTHER; note = 2'-O-methyladenosine-3'-phosphate
  modified_base 11: mod_base = OTHER; note = 2'-O-methylcytidine-3'-phosphate
  modified_base 12: mod_base = OTHER; note = 2'-O-methyladenosine-3'-phosphate
  modified_base 13: mod_base = OTHER; note = 2'-O-methylguanosine-3'-phosphate
  modified_base 14: mod_base = OTHER; note = 2'-fluoroadenosine-3'-phosphate
  modified_base 15: mod_base = OTHER; note = 2'-O-methyladenosine-3'-phosphate
  modified_base 16: mod_base = OTHER; note = 2'-fluoroguanosine-3'-phosphate
  modified_base 17: mod_base = OTHER; note = 2'-O-methyluridine-3'-phosphate
  modified_base 18: mod_base = OTHER; note = 2'-O-methylcytidine-3'-phosphate
  modified_base 19: mod_base = OTHER; note = 2'-O-methylguanosine-3'-phosphate
  modified_base 20: mod_base = OTHER; note = 2'-O-methyladenosine-3'-phosphate
  modified_base 21: mod_base = OTHER; note = 2'-O-methylcytidine-3'- phosphorothioate
  modified_base 22: mod_base = OTHER; note = 2'-O-methyladenosine-3'- phosphorothioate
  modified_base 23: mod_base = OTHER; note = 2'-O-methylguanosine-3'-phosphate
tgtcctaaaacagaagtcgacag

SEQ ID NO: 2886 - RNA, 21 nt, synthetic construct
  misc_feature 1..21: note = Description of Artificial Sequence: Synthetic oligonucleotide
  source 1..21: mol_type = other RNA
  modified_base 1: mod_base = OTHER; note = 2'-O-methylguanosine-3'- phosphorothioate
  modified_base 2: mod_base = OTHER; note = 2'-O-methyladenosine-3'- phosphorothioate
  modified_base 3: mod_base = OTHER; note = 2'-O-methyluridine-3'-phosphate
  modified_base 4: mod_base = OTHER; note = 2'-O-methylcytidine-3'-phosphate
  modified_base 5: mod_base = OTHER; note = 2'-O-methyluridine-3'-phosphate
  modified_base 6: mod_base = OTHER; note = 2'-O-methylguanosine-3'-phosphate
  modified_base 7: mod_base = OTHER; note = 2'-fluorouridine-3'-phosphate
  modified_base 8: mod_base = OTHER; note = 2'-O-methylcytidine-3'-phosphate
  modified_base 9: mod_base = OTHER; note = 2'-fluoroguanosine-3'-phosphate
  modified_base 10: mod_base = OTHER; note = 2'-fluoroadenosine-3'-phosphate
  modified_base 11: mod_base = OTHER; note = 2'-fluorocytidine-3'-phosphate
  modified_base 12: mod_base = OTHER; note = 2'-O-methyluridine-3'-phosphate
  modified_base 13: mod_base = OTHER; note = 2'-O-methyluridine-3'-phosphate
  modified_base 14: mod_base = OTHER; note = 2'-O-methylcytidine-3'-phosphate
  modified_base 15: mod_base = OTHER; note = 2'-O-methyluridine-3'-phosphate
  modified_base 16: mod_base = OTHER; note = 2'-O-methylguanosine-3'-phosphate
  modified_base 17: mod_base = OTHER; note = 2'-O-methyluridine-3'-phosphate
  modified_base 18: mod_base = OTHER; note = 2'-O-methyluridine-3'-phosphate
  modified_base 19: mod_base = OTHER; note = 2'-O-methyluridine-3'-phosphate
  modified_base 20: mod_base = OTHER; note = 2'-O-methyluridine-3'-phosphate
  modified_base 21: mod_base = OTHER; note = 2'-O-methyladenosine-3'-phosphate attached to N-[tris(N-acetylgalactosamine-alkyl)-amidodecanoyl)]-4-hydr oxyprolinol Hyp-(N-acetylgalactosamine-alkyl)3
gatctgtcgacttctgtttta

SEQ ID NO: 2887 - RNA, 23 nt, synthetic construct
  misc_feature 1..23: note = Description of Artificial Sequence: Synthetic oligonucleotide
  source 1..23: mol_type = other RNA
  modified_base 1: mod_base = OTHER; note = 2'-O-methyluridine-3'-phosphorothioate
  modified_base 2: mod_base = OTHER; note = 2'-fluoroadenosine-3'-phosphorothioate
  modified_base 3: mod_base = OTHER; note = 2'-O-methyladenosine-3'-phosphate
  modified_base 4: mod_base = OTHER; note = 2'-O-methyladenosine-3'-phosphate
  modified_base 5: mod_base = OTHER; note = 2'-O-methyladenosine-3'-phosphate
  modified_base 6: mod_base = OTHER; note = 2'-fluorocytidine-3'-phosphate
  modified_base 7: mod_base = OTHER; note = 2'-O-methyladenosine-3'-phosphate
  modified_base 8: mod_base = OTHER; note = 2'-fluoroguanosine-3'-phosphate
  modified_base 9: mod_base = OTHER; note = 2'-fluoroadenosine-3'-phosphate
  modified_base 10: mod_base = OTHER; note = 2'-O-methyladenosine-3'-phosphate
  modified_base 11: mod_base = OTHER; note = 2'-O-methylguanosine-3'-phosphate
  modified_base 12: mod_base = OTHER; note = 2'-O-methyluridine-3'-phosphate
  modified_base 13: mod_base = OTHER; note = 2'-O-methylcytidine-3'-phosphate
  modified_base 14: mod_base = OTHER; note = 2'-fluoroguanosine-3'-phosphate
  modified_base 15: mod_base = OTHER; note = 2'-O-methyladenosine-3'-phosphate
  modified_base 16: mod_base = OTHER; note = 2'-fluorocytidine-3'-phosphate
  modified_base 17: mod_base = OTHER; note = 2'-O-methyladenosine-3'-phosphate
  modified_base 18: mod_base = OTHER; note = 2'-O-methylguanosine-3'-phosphate
  modified_base 19: mod_base = OTHER; note = 2'-O-methyladenosine-3'-phosphate
  modified_base 20: mod_base = OTHER; note = 2'-O-methyluridine-3'-phosphate
  modified_base 21: mod_base = OTHER; note = 2'-O-methylcytidine-3'- phosphorothioate
  modified_base 22: mod_base = OTHER; note = 2'-O-methyluridine-3'-phosphorothioate
  modified_base 23: mod_base = OTHER; note = 2'-O-methylguanosine-3'-phosphate
taaaacagaagtcgacagatctg

SEQ ID NO: 2888 - RNA, 21 nt, synthetic construct
  misc_feature 1..21: note = Description of Artificial Sequence: Synthetic oligonucleotide
  source 1..21: mol_type = other RNA
  modified_base 1: mod_base = OTHER; note = 2'-O-methyladenosine-3'- phosphorothioate
  modified_base 2: mod_base = OTHER; note = 2'-O-methylguanosine-3'- phosphorothioate
  modified_base 3: mod_base = OTHER; note = 2'-O-methyladenosine-3'-phosphate
  modified_base 4: mod_base = OTHER; note = 2'-O-methyluridine-3'-phosphate
  modified_base 5: mod_base = OTHER; note = 2'-O-methylcytidine-3'-phosphate
  modified_base 6: mod_base = OTHER; note = 2'-O-methyluridine-3'-phosphate
  modified_base 7: mod_base = OTHER; note = 2'-fluoroguanosine-3'-phosphate
  modified_base 8: mod_base = OTHER; note = 2'-O-methyluridine-3'-phosphate
  modified_base 9: mod_base = OTHER; note = 2'-fluorocytidine-3'-phosphate
  modified_base 10: mod_base = OTHER; note = 2'-fluoroguanosine-3'-phosphate
  modified_base 11: mod_base = OTHER; note = 2'-fluoroadenosine-3'-phosphate
  modified_base 12: mod_base = OTHER; note = 2'-O-methylcytidine-3'-phosphate
  modified_base 13: mod_base = OTHER; note = 2'-O-methyluridine-3'-phosphate
  modified_base 14: mod_base = OTHER; note = 2'-O-methyluridine-3'-phosphate
  modified_base 15: mod_base = OTHER; note = 2'-O-methylcytidine-3'-phosphate
  modified_base 16: mod_base = OTHER; note = 2'-O-methyluridine-3'-phosphate
  modified_base 17: mod_base = OTHER; note = 2'-O-methylguanosine-3'-phosphate
  modified_base 18: mod_base = OTHER; note = 2'-O-methyluridine-3'-phosphate
  modified_base 19: mod_base = OTHER; note = 2'-O-methyluridine-3'-phosphate
  modified_base 20: mod_base = OTHER; note = 2'-O-methyluridine-3'-phosphate
  modified_base 21: mod_base = OTHER; note = 2'-O-methyluridine-3'-phosphate attached to N-[tris(N-acetylgalactosamine-alkyl)-amidodecanoyl)]-4-hydr oxyprolinol Hyp-(N-acetylgalactosamine-alkyl)3
agatctgtcgacttctgtttt

SEQ ID NO: 2889 - RNA, 23 nt, synthetic construct
  misc_feature 1..23: note = Description of Artificial Sequence: Synthetic oligonucleotide
  source 1..23: mol_type = other RNA
  modified_base 1: mod_base = OTHER; note = 2'-O-methyladenosine-3'- phosphorothioate
  modified_base 2: mod_base = OTHER; note = 2'-fluoroadenosine-3'-phosphorothioate
  modified_base 3: mod_base = OTHER; note = 2'-O-methyladenosine-3'-phosphate
  modified_base 4: mod_base = OTHER; note = 2'-O-methyladenosine-3'-phosphate
  modified_base 5: mod_base = OTHER; note = 2'-O-methylcytidine-3'-phosphate
  modified_base 6: mod_base = OTHER; note = 2'-fluoroadenosine-3'-phosphate
  modified_base 7: mod_base = OTHER; note = 2'-O-methylguanosine-3'-phosphate
  modified_base 8: mod_base = OTHER; note = 2'-fluoroadenosine-3'-phosphate
  modified_base 9: mod_base = OTHER; note = 2'-fluoroadenosine-3'-phosphate
  modified_base 10: mod_base = OTHER; note = 2'-O-methylguanosine-3'-phosphate
  modified_base 11: mod_base = OTHER; note = 2'-O-methyluridine-3'-phosphate
  modified_base 12: mod_base = OTHER; note = 2'-O-methylcytidine-3'-phosphate
  modified_base 13: mod_base = OTHER; note = 2'-O-methylguanosine-3'-phosphate
  modified_base 14: mod_base = OTHER; note = 2'-fluoroadenosine-3'-phosphate
  modified_base 15: mod_base = OTHER; note = 2'-O-methylcytidine-3'-phosphate
  modified_base 16: mod_base = OTHER; note = 2'-fluoroadenosine-3'-phosphate
  modified_base 17: mod_base = OTHER; note = 2'-O-methylguanosine-3'-phosphate
  modified_base 18: mod_base = OTHER; note = 2'-O-methyladenosine-3'-phosphate
  modified_base 19: mod_base = OTHER; note = 2'-O-methyluridine-3'-phosphate
  modified_base 20: mod_base = OTHER; note = 2'-O-methylcytidine-3'-phosphate
  modified_base 21: mod_base = OTHER; note = 2'-O-methyluridine-3'-phosphorothioate
  modified_base 22: mod_base = OTHER; note = 2'-O-methylguanosine-3'- phosphorothioate
  modified_base 23: mod_base = OTHER; note = 2'-O-methyluridine-3'-phosphate
aaaacagaagtcgacagatctgt

SEQ ID NO: 2890 - RNA, 21 nt, synthetic construct
  misc_feature 1..21: note = Description of Artificial Sequence: Synthetic oligonucleotide
  source 1..21: mol_type = other RNA
  modified_base 1: mod_base = OTHER; note = 2'-O-methylcytidine-3'- phosphorothioate
  modified_base 2: mod_base = OTHER; note = 2'-O-methylcytidine-3'- phosphorothioate
  modified_base 3: mod_base = OTHER; note = 2'-O-methylguanosine-3'-phosphate
  modified_base 4: mod_base = OTHER; note = 2'-O-methyladenosine-3'-phosphate
  modified_base 5: mod_base = OTHER; note = 2'-O-methylguanosine-3'-phosphate
  modified_base 6: mod_base = OTHER; note = 2'-O-methyladenosine-3'-phosphate
  modified_base 7: mod_base = OTHER; note = 2'-fluoroadenosine-3'-phosphate
  modified_base 8: mod_base = OTHER; note = 2'-O-methylguanosine-3'-phosphate
  modified_base 9: mod_base = OTHER; note = 2'-fluorouridine-3'-phosphate
  modified_base 10: mod_base = OTHER; note = 2'-fluorocytidine-3'-phosphate
  modified_base 11: mod_base = OTHER; note = 2'-fluoroadenosine-3'-phosphate
  modified_base 12: mod_base = OTHER; note = 2'-O-methylcytidine-3'-phosphate
  modified_base 13: mod_base = OTHER; note = 2'-O-methylcytidine-3'-phosphate
  modified_base 14: mod_base = OTHER; note = 2'-O-methyladenosine-3'-phosphate
  modified_base 15: mod_base = OTHER; note = 2'-O-methyladenosine-3'-phosphate
  modified_base 16: mod_base = OTHER; note = 2'-O-methylguanosine-3'-phosphate
  modified_base 17: mod_base = OTHER; note = 2'-O-methyladenosine-3'-phosphate
  modified_base 18: mod_base = OTHER; note = 2'-O-methyladenosine-3'-phosphate
  modified_base 19: mod_base = OTHER; note = 2'-O-methylguanosine-3'-phosphate
  modified_base 20: mod_base = OTHER; note = 2'-O-methylcytidine-3'-phosphate
  modified_base 21: mod_base = OTHER; note = 2'-O-methyluridine-3'-phosphate attached to N-[tris(N-acetylgalactosamine-alkyl)-amidodecanoyl)]-4-hydr oxyprolinol Hyp-(N-acetylgalactosamine-alkyl)3
ccgagaagtcaccaagaagct

SEQ ID NO: 2891 - RNA, 23 nt, synthetic construct
  misc_feature 1..23: note = Description of Artificial Sequence: Synthetic oligonucleotide
  source 1..23: mol_type = other RNA
  modified_base 1: mod_base = OTHER; note = 2'-O-methyladenosine-3'- phosphorothioate
  modified_base 2: mod_base = OTHER; note = 2'-fluoroguanosine-3'-phosphorothioate
  modified_base 3: mod_base = OTHER; note = 2'-O-methylcytidine-3'-phosphate
  modified_base 4: mod_base = OTHER; note = 2'-O-methyluridine-3'-phosphate
  modified_base 5: mod_base = OTHER; note = 2'-O-methyluridine-3'-phosphate
  modified_base 6: mod_base = OTHER; note = 2'-fluorocytidine-3'-phosphate
  modified_base 7: mod_base = OTHER; note = 2'-O-methyluridine-3'-phosphate
  modified_base 8: mod_base = OTHER; note = 2'-fluorouridine-3'-phosphate
  modified_base 9: mod_base = OTHER; note = 2'-fluoroguanosine-3'-phosphate
  modified_base 10: mod_base = OTHER; note = 2'-O-methylguanosine-3'-phosphate
  modified_base 11: mod_base = OTHER; note = 2'-O-methyluridine-3'-phosphate
  modified_base 12: mod_base = OTHER; note = 2'-O-methylguanosine-3'-phosphate
  modified_base 13: mod_base = OTHER; note = 2'-O-methyladenosine-3'-phosphate
  modified_base 14: mod_base = OTHER; note = 2'-fluorocytidine-3'-phosphate
  modified_base 15: mod_base = OTHER; note = 2'-O-methyluridine-3'-phosphate
  modified_base 16: mod_base = OTHER; note = 2'-fluorouridine-3'-phosphate
  modified_base 17: mod_base = OTHER; note = 2'-O-methylcytidine-3'-phosphate
  modified_base 18: mod_base = OTHER; note = 2'-O-methyluridine-3'-phosphate
  modified_base 19: mod_base = OTHER; note = 2'-O-methylcytidine-3'-phosphate
  modified_base 20: mod_base = OTHER; note = 2'-O-methylguanosine-3'-phosphate
  modified_base 21: mod_base = OTHER; note = 2'-O-methylguanosine-3'- phosphorothioate
  modified_base 22: mod_base = OTHER; note = 2'-O-methyluridine-3'-phosphorothioate
  modified_base 23: mod_base = OTHER; note = 2'-O-methylcytidine-3'-phosphate
agcttcttggtgacttctcggtc

SEQ ID NO: 2892 - RNA, 21 nt, synthetic construct
  misc_feature 1..21: note = Description of Artificial Sequence: Synthetic oligonucleotide
  source 1..21: mol_type = other RNA
  modified_base 1: mod_base = OTHER; note = 2'-O-methylcytidine-3'- phosphorothioate
  modified_base 2: mod_base = OTHER; note = 2'-O-methylguanosine-3'- phosphorothioate
  modified_base 3: mod_base = OTHER; note = 2'-O-methyladenosine-3'-phosphate
  modified_base 4: mod_base = OTHER; note = 2'-O-methylguanosine-3'-phosphate
  modified_base 5: mod_base = OTHER; note = 2'-O-methyladenosine-3'-phosphate
  modified_base 6: mod_base = OTHER; note = 2'-O-methyladenosine-3'-phosphate
  modified_base 7: mod_base = OTHER; note = 2'-fluoroguanosine-3'-phosphate
  modified_base 8: mod_base = OTHER; note = 2'-O-methyluridine-3'-phosphate
  modified_base 9: mod_base = OTHER; note = 2'-fluorocytidine-3'-phosphate
  modified_base 10: mod_base = OTHER; note = 2'-fluoroadenosine-3'-phosphate
  modified_base 11: mod_base = OTHER; note = 2'-fluorocytidine-3'-phosphate
  modified_base 12: mod_base = OTHER; note = 2'-O-methylcytidine-3'-phosphate
  modified_base 13: mod_base = OTHER; note = 2'-O-methyladenosine-3'-phosphate
  modified_base 14: mod_base = OTHER; note = 2'-O-methyladenosine-3'-phosphate
  modified_base 15: mod_base = OTHER; note = 2'-O-methylguanosine-3'-phosphate
  modified_base 16: mod_base = OTHER; note = 2'-O-methyladenosine-3'-phosphate
  modified_base 17: mod_base = OTHER; note = 2'-O-methyladenosine-3'-phosphate
  modified_base 18: mod_base = OTHER; note = 2'-O-methylguanosine-3'-phosphate
  modified_base 19: mod_base = OTHER; note = 2'-O-methylcytidine-3'-phosphate
  modified_base 20: mod_base = OTHER; note = 2'-O-methyluridine-3'-phosphate
  modified_base 21: mod_base = OTHER; note = 2'-O-methyladenosine-3'-phosphate attached to N-[tris(N-acetylgalactosamine-alkyl)-amidodecanoyl)]-4-hydr oxyprolinol Hyp-(N-acetylgalactosamine-alkyl)3
cgagaagtcaccaagaagcta

SEQ ID NO: 2893 - RNA, 23 nt, synthetic construct
  misc_feature 1..23: note = Description of Artificial Sequence: Synthetic oligonucleotide
  source 1..23: mol_type = other RNA
  modified_base 1: mod_base = OTHER; note = 2'-O-methyluridine-3'-phosphorothioate
  modified_base 2: mod_base = OTHER; note = 2'-fluoroadenosine-3'-phosphorothioate
  modified_base 3: mod_base = OTHER; note = 2'-O-methylguanosine-3'-phosphate
  modified_base 4: mod_base = OTHER; note = 2'-O-methylcytidine-3'-phosphate
  modified_base 5: mod_base = OTHER; note = 2'-O-methyluridine-3'-phosphate
  modified_base 6: mod_base = OTHER; note = 2'-fluorouridine-3'-phosphate
  modified_base 7: mod_base = OTHER; note = 2'-O-methylcytidine-3'-phosphate
  modified_base 8: mod_base = OTHER; note = 2'-fluorouridine-3'-phosphate
  modified_base 9: mod_base = OTHER; note = 2'-fluorouridine-3'-phosphate
  modified_base 10: mod_base = OTHER; note = 2'-O-methylguanosine-3'-phosphate
  modified_base 11: mod_base = OTHER; note = 2'-O-methylguanosine-3'-phosphate
  modified_base 12: mod_base = OTHER; note = 2'-O-methyluridine-3'-phosphate
  modified_base 13: mod_base = OTHER; note = 2'-O-methylguanosine-3'-phosphate
  modified_base 14: mod_base = OTHER; note = 2'-fluoroadenosine-3'-phosphate
  modified_base 15: mod_base = OTHER; note = 2'-O-methylcytidine-3'-phosphate
  modified_base 16: mod_base = OTHER; note = 2'-fluorouridine-3'-phosphate
  modified_base 17: mod_base = OTHER; note = 2'-O-methyluridine-3'-phosphate
  modified_base 18: mod_base = OTHER; note = 2'-O-methylcytidine-3'-phosphate
  modified_base 19: mod_base = OTHER; note = 2'-O-methyluridine-3'-phosphate
  modified_base 20: mod_base = OTHER; note = 2'-O-methylcytidine-3'-phosphate
  modified_base 21: mod_base = OTHER; note = 2'-O-methylguanosine-3'- phosphorothioate
  modified_base 22: mod_base = OTHER; note = 2'-O-methylguanosine-3'- phosphorothioate
  modified_base 23: mod_base = OTHER; note = 2'-O-methyluridine-3'-phosphate
tagcttcttggtgacttctcggt

SEQ ID NO: 2894 - RNA, 21 nt, synthetic construct
  misc_feature 1..21: note = Description of Artificial Sequence: Synthetic oligonucleotide
  source 1..21: mol_type = other RNA
  modified_base 1: mod_base = OTHER; note = 2'-O-methyladenosine-3'- phosphorothioate
  modified_base 2: mod_base = OTHER; note = 2'-O-methylguanosine-3'- phosphorothioate
  modified_base 3: mod_base = OTHER; note = 2'-O-methylguanosine-3'-phosphate
  modified_base 4: mod_base = OTHER; note = 2'-O-methyladenosine-3'-phosphate
  modified_base 5: mod_base = OTHER; note = 2'-O-methylcytidine-3'-phosphate
  modified_base 6: mod_base = OTHER; note = 2'-O-methylcytidine-3'-phosphate
  modified_base 7: mod_base = OTHER; note = 2'-fluoroguanosine-3'-phosphate
  modified_base 8: mod_base = OTHER; note = 2'-O-methyladenosine-3'-phosphate
  modified_base 9: mod_base = OTHER; note = 2'-fluoroguanosine-3'-phosphate
  modified_base 10: mod_base = OTHER; note = 2'-fluoroadenosine-3'-phosphate
  modified_base 11: mod_base = OTHER; note = 2'-fluoroadenosine-3'-phosphate
  modified_base 12: mod_base = OTHER; note = 2'-O-methylguanosine-3'-phosphate
  modified_base 13: mod_base = OTHER; note = 2'-O-methyluridine-3'-phosphate
  modified_base 14: mod_base = OTHER; note = 2'-O-methylcytidine-3'-phosphate
  modified_base 15: mod_base = OTHER; note = 2'-O-methyladenosine-3'-phosphate
  modified_base 16: mod_base = OTHER; note = 2'-O-methylcytidine-3'-phosphate
  modified_base 17: mod_base = OTHER; note = 2'-O-methylcytidine-3'-phosphate
  modified_base 18: mod_base = OTHER; note = 2'-O-methyladenosine-3'-phosphate
  modified_base 19: mod_base = OTHER; note = 2'-O-methyladenosine-3'-phosphate
  modified_base 20: mod_base = OTHER; note = 2'-O-methylguanosine-3'-phosphate
  modified_base 21: mod_base = OTHER; note = 2'-O-methyladenosine-3'-phosphate attached to N-[tris(N-acetylgalactosamine-alkyl)-amidodecanoyl)]-4-hydr oxyprolinol Hyp-(N-acetylgalactosamine-alkyl)3
aggaccgagaagtcaccaaga

SEQ ID NO: 2895 - RNA, 23 nt, synthetic construct
  misc_feature 1..23: note = Description of Artificial Sequence: Synthetic oligonucleotide
  source 1..23: mol_type = other RNA
  modified_base 1: mod_base = OTHER; note = 2'-O-methyluridine-3'-phosphorothioate
  modified_base 2: mod_base = OTHER; note = 2'-fluorocytidine-3'-phosphorothioate
  modified_base 3: mod_base = OTHER; note = 2'-O-methyluridine-3'-phosphate
  modified_base 4: mod_base = OTHER; note = 2'-O-methyluridine-3'-phosphate
  modified_base 5: mod_base = OTHER; note = 2'-O-methylguanosine-3'-phosphate
  modified_base 6: mod_base = OTHER; note = 2'-fluoroguanosine-3'-phosphate
  modified_base 7: mod_base = OTHER; note = 2'-O-methyluridine-3'-phosphate
  modified_base 8: mod_base = OTHER; note = 2'-fluoroguanosine-3'-phosphate
  modified_base 9: mod_base = OTHER; note = 2'-fluoroadenosine-3'-phosphate
  modified_base 10: mod_base = OTHER; note = 2'-O-methylcytidine-3'-phosphate
  modified_base 11: mod_base = OTHER; note = 2'-O-methyluridine-3'-phosphate
  modified_base 12: mod_base = OTHER; note = 2'-O-methyluridine-3'-phosphate
  modified_base 13: mod_base = OTHER; note = 2'-O-methylcytidine-3'-phosphate
  modified_base 14: mod_base = OTHER; note = 2'-fluorouridine-3'-phosphate
  modified_base 15: mod_base = OTHER; note = 2'-O-methylcytidine-3'-phosphate
  modified_base 16: mod_base = OTHER; note = 2'-fluoroguanosine-3'-phosphate
  modified_base 17: mod_base = OTHER; note = 2'-O-methylguanosine-3'-phosphate
  modified_base 18: mod_base = OTHER; note = 2'-O-methyluridine-3'-phosphate
  modified_base 19: mod_base = OTHER; note = 2'-O-methylcytidine-3'-phosphate
  modified_base 20: mod_base = OTHER; note = 2'-O-methylcytidine-3'-phosphate
  modified_base 21: mod_base = OTHER; note = 2'-O-methyluridine-3'-phosphorothioate
  modified_base 22: mod_base = OTHER; note = 2'-O-methyluridine-3'-phosphorothioate
  modified_base 23: mod_base = OTHER; note = 2'-O-methylguanosine-3'-phosphate
tcttggtgacttctcggtccttg

SEQ ID NO: 2896 - RNA, 21 nt, synthetic construct
  misc_feature 1..21: note = Description of Artificial Sequence: Synthetic oligonucleotide
  source 1..21: mol_type = other RNA
  modified_base 1: mod_base = OTHER; note = 2'-O-methyladenosine-3'- phosphorothioate
  modified_base 2: mod_base = OTHER; note = 2'-O-methyladenosine-3'- phosphorothioate
  modified_base 3: mod_base = OTHER; note = 2'-O-methylguanosine-3'-phosphate
  modified_base 4: mod_base = OTHER; note = 2'-O-methylguanosine-3'-phosphate
  modified_base 5: mod_base = OTHER; note = 2'-O-methyladenosine-3'-phosphate
  modified_base 6: mod_base = OTHER; note = 2'-O-methylcytidine-3'-phosphate
  modified_base 7: mod_base = OTHER; note = 2'-fluorocytidine-3'-phosphate
  modified_base 8: mod_base = OTHER; note = 2'-O-methylguanosine-3'-phosphate
  modified_base 9: mod_base = OTHER; note = 2'-fluoroadenosine-3'-phosphate
  modified_base 10: mod_base = OTHER; note = 2'-fluoroguanosine-3'-phosphate
  modified_base 11: mod_base = OTHER; note = 2'-fluoroadenosine-3'-phosphate
  modified_base 12: mod_base = OTHER; note = 2'-O-methyladenosine-3'-phosphate
  modified_base 13: mod_base = OTHER; note = 2'-O-methylguanosine-3'-phosphate
  modified_base 14: mod_base = OTHER; note = 2'-O-methyluridine-3'-phosphate
  modified_base 15: mod_base = OTHER; note = 2'-O-methylcytidine-3'-phosphate
  modified_base 16: mod_base = OTHER; note = 2'-O-methyladenosine-3'-phosphate
  modified_base 17: mod_base = OTHER; note = 2'-O-methylcytidine-3'-phosphate
  modified_base 18: mod_base = OTHER; note = 2'-O-methylcytidine-3'-phosphate
  modified_base 19: mod_base = OTHER; note = 2'-O-methyladenosine-3'-phosphate
  modified_base 20: mod_base = OTHER; note = 2'-O-methyladenosine-3'-phosphate
  modified_base 21: mod_base = OTHER; note = 2'-O-methylguanosine-3'-phosphate attached to N-[tris(N-acetylgalactosamine-alkyl)-amidodecanoyl)]-4-hydr oxyprolinol Hyp-(N-acetylgalactosamine-alkyl)3
aaggaccgagaagtcaccaag

SEQ ID NO: 2897 - RNA, 23 nt, synthetic construct
  misc_feature 1..23: note = Description of Artificial Sequence: Synthetic oligonucleotide
  source 1..23: mol_type = other RNA
  modified_base 1: mod_base = OTHER; note = 2'-O-methylcytidine-3'- phosphorothioate
  modified_base 2: mod_base = OTHER; note = 2'-fluorouridine -3'-phosphorothioate
  modified_base 3: mod_base = OTHER; note = 2'-O-methyluridine-3'-phosphate
  modified_base 4: mod_base = OTHER; note = 2'-O-methylguanosine-3'-phosphate
  modified_base 5: mod_base = OTHER; note = 2'-O-methylguanosine-3'-phosphate
  modified_base 6: mod_base = OTHER; note = 2'-fluorouridine-3'-phosphate
  modified_base 7: mod_base = OTHER; note = 2'-O-methylguanosine-3'-phosphate
  modified_base 8: mod_base = OTHER; note = 2'-fluoroadenosine-3'-phosphate
  modified_base 9: mod_base = OTHER; note = 2'-fluorocytidine-3'-phosphate
  modified_base 10: mod_base = OTHER; note = 2'-O-methyluridine-3'-phosphate
  modified_base 11: mod_base = OTHER; note = 2'-O-methyluridine-3'-phosphate
  modified_base 12: mod_base = OTHER; note = 2'-O-methylcytidine-3'-phosphate
  modified_base 13: mod_base = OTHER; note = 2'-O-methyluridine-3'-phosphate
  modified_base 14: mod_base = OTHER; note = 2'-fluorocytidine-3'-phosphate
  modified_base 15: mod_base = OTHER; note = 2'-O-methylguanosine-3'-phosphate
  modified_base 16: mod_base = OTHER; note = 2'-fluoroguanosine-3'-phosphate
  modified_base 17: mod_base = OTHER; note = 2'-O-methyluridine-3'-phosphate
  modified_base 18: mod_base = OTHER; note = 2'-O-methylcytidine-3'-phosphate
  modified_base 19: mod_base = OTHER; note = 2'-O-methylcytidine-3'-phosphate
  modified_base 20: mod_base = OTHER; note = 2'-O-methyluridine-3'-phosphate
  modified_base 21: mod_base = OTHER; note = 2'-O-methyluridine-3'-phosphorothioate
  modified_base 22: mod_base = OTHER; note = 2'-O-methylguanosine-3'- phosphorothioate
  modified_base 23: mod_base = OTHER; note = 2'-O-methyluridine-3'-phosphate
cttggtgacttctcggtccttgt

SEQ ID NO: 2898 - RNA, 21 nt, synthetic construct
  misc_feature 1..21: note = Description of Artificial Sequence: Synthetic oligonucleotide
  source 1..21: mol_type = other RNA
  modified_base 1: mod_base = OTHER; note = 2'-O-methyladenosine-3'- phosphorothioate
  modified_base 2: mod_base = OTHER; note = 2'-O-methyladenosine-3'- phosphorothioate
  modified_base 3: mod_base = OTHER; note = 2'-O-methyladenosine-3'-phosphate
  modified_base 4: mod_base = OTHER; note = 2'-O-methylcytidine-3'-phosphate
  modified_base 5: mod_base = OTHER; note = 2'-O-methyladenosine-3'-phosphate
  modified_base 6: mod_base = OTHER; note = 2'-O-methyluridine-3'-phosphate
  modified_base 7: mod_base = OTHER; note = 2'-fluoroguanosine-3'-phosphate
  modified_base 8: mod_base = OTHER; note = 2'-O-methylguanosine-3'-phosphate
  modified_base 9: mod_base = OTHER; note = 2'-fluorocytidine-3'-phosphate
  modified_base 10: mod_base = OTHER; note = 2'-fluorouridine-3'-phosphate
  modified_base 11: mod_base = OTHER; note = 2'-fluorouridine-3'-phosphate
  modified_base 12: mod_base = OTHER; note = 2'-O-methylguanosine-3'-phosphate
  modified_base 13: mod_base = OTHER; note = 2'-O-methyladenosine-3'-phosphate
  modified_base 14: mod_base = OTHER; note = 2'-O-methyladenosine-3'-phosphate
  modified_base 15: mod_base = OTHER; note = 2'-O-methyluridine-3'-phosphate
  modified_base 16: mod_base = OTHER; note = 2'-O-methylguanosine-3'-phosphate
  modified_base 17: mod_base = OTHER; note = 2'-O-methylguanosine-3'-phosphate
  modified_base 18: mod_base = OTHER; note = 2'-O-methylguanosine-3'-phosphate
  modified_base 19: mod_base = OTHER; note = 2'-O-methyladenosine-3'-phosphate
  modified_base 20: mod_base = OTHER; note = 2'-O-methyluridine-3'-phosphate
  modified_base 21: mod_base = OTHER; note = 2'-O-methylcytidine-3'-phosphate attached to N-[tris(N-acetylgalactosamine-alkyl)-amidodecanoyl)]-4-hydr oxyprolinol Hyp-(N-acetylgalactosamine-alkyl)3
aaacatggcttgaatgggatc

SEQ ID NO: 2899 - RNA, 23 nt, synthetic construct
  misc_feature 1..23: note = Description of Artificial Sequence: Synthetic oligonucleotide
  source 1..23: mol_type = other RNA
  modified_base 1: mod_base = OTHER; note = 2'-O-methylguanosine-3'- phosphorothioate
  modified_base 2: mod_base = OTHER; note = 2'-fluoroadenosine-3'-phosphorothioate
  modified_base 3: mod_base = OTHER; note = 2'-O-methyluridine-3'-phosphate
  modified_base 4: mod_base = OTHER; note = 2'-O-methylcytidine-3'-phosphate
  modified_base 5: mod_base = OTHER; note = 2'-O-methylcytidine-3'-phosphate
  modified_base 6: mod_base = OTHER; note = 2'-fluorocytidine-3'-phosphate
  modified_base 7: mod_base = OTHER; note = 2'-O-methyladenosine-3'-phosphate
  modified_base 8: mod_base = OTHER; note = 2'-fluorouridine-3'-phosphate
  modified_base 9: mod_base = OTHER; note = 2'-fluorouridine-3'-phosphate
  modified_base 10: mod_base = OTHER; note = 2'-O-methylcytidine-3'-phosphate
  modified_base 11: mod_base = OTHER; note = 2'-O-methyladenosine-3'-phosphate
  modified_base 12: mod_base = OTHER; note = 2'-O-methyladenosine-3'-phosphate
  modified_base 13: mod_base = OTHER; note = 2'-O-methylguanosine-3'-phosphate
  modified_base 14: mod_base = OTHER; note = 2'-fluorocytidine-3'-phosphate
  modified_base 15: mod_base = OTHER; note = 2'-O-methylcytidine-3'-phosphate
  modified_base 16: mod_base = OTHER; note = 2'-fluoroadenosine-3'-phosphate
  modified_base 17: mod_base = OTHER; note = 2'-O-methyluridine-3'-phosphate
  modified_base 18: mod_base = OTHER; note = 2'-O-methylguanosine-3'-phosphate
  modified_base 19: mod_base = OTHER; note = 2'-O-methyluridine-3'-phosphate
  modified_base 20: mod_base = OTHER; note = 2'-O-methyluridine-3'-phosphate
  modified_base 21: mod_base = OTHER; note = 2'-O-methyluridine-3'-phosphorothioate
  modified_base 22: mod_base = OTHER; note = 2'-O-methyladenosine-3'- phosphorothioate
  modified_base 23: mod_base = OTHER; note = 2'-O-methyladenosine-3'-phosphate
gatcccattcaagccatgtttaa

SEQ ID NO: 2900 - RNA, 21 nt, synthetic construct
  misc_feature 1..21: note = Description of Artificial Sequence: Synthetic oligonucleotide
  source 1..21: mol_type = other RNA
  modified_base 1: mod_base = OTHER; note = 2'-O-methyladenosine-3'- phosphorothioate
  modified_base 2: mod_base = OTHER; note = 2'-O-methyladenosine-3'- phosphorothioate
  modified_base 3: mod_base = OTHER; note = 2'-O-methylcytidine-3'-phosphate
  modified_base 4: mod_base = OTHER; note = 2'-O-methyladenosine-3'-phosphate
  modified_base 5: mod_base = OTHER; note = 2'-O-methyluridine-3'-phosphate
  modified_base 6: mod_base = OTHER; note = 2'-O-methylguanosine-3'-phosphate
  modified_base 7: mod_base = OTHER; note = 2'-fluoroguanosine-3'-phosphate
  modified_base 8: mod_base = OTHER; note = 2'-O-methylcytidine-3'-phosphate
  modified_base 9: mod_base = OTHER; note = 2'-fluorouridine-3'-phosphate
  modified_base 10: mod_base = OTHER; note = 2'-fluorouridine-3'-phosphate
  modified_base 11: mod_base = OTHER; note = 2'-fluoroguanosine-3'-phosphate
  modified_base 12: mod_base = OTHER; note = 2'-O-methyladenosine-3'-phosphate
  modified_base 13: mod_base = OTHER; note = 2'-O-methyladenosine-3'-phosphate
  modified_base 14: mod_base = OTHER; note = 2'-O-methyluridine-3'-phosphate
  modified_base 15: mod_base = OTHER; note = 2'-O-methylguanosine-3'-phosphate
  modified_base 16: mod_base = OTHER; note = 2'-O-methylguanosine-3'-phosphate
  modified_base 17: mod_base = OTHER; note = 2'-O-methylguanosine-3'-phosphate
  modified_base 18: mod_base = OTHER; note = 2'-O-methyladenosine-3'-phosphate
  modified_base 19: mod_base = OTHER; note = 2'-O-methyluridine-3'-phosphate
  modified_base 20: mod_base = OTHER; note = 2'-O-methylcytidine-3'-phosphate
  modified_base 21: mod_base = OTHER; note = 2'-O-methyluridine-3'-phosphate attached to N-[tris(N-acetylgalactosamine-alkyl)-amidodecanoyl)]-4-hydr oxyprolinol Hyp-(N-acetylgalactosamine-alkyl)3
aacatggcttgaatgggatct

SEQ ID NO: 2901 - RNA, 23 nt, synthetic construct
  misc_feature 1..23: note = Description of Artificial Sequence: Synthetic oligonucleotide
  source 1..23: mol_type = other RNA
  modified_base 1: mod_base = OTHER; note = 2'-O-methyladenosine-3'- phosphorothioate
  modified_base 2: mod_base = OTHER; note = 2'-fluoroguanosine-3'-phosphorothioate
  modified_base 3: mod_base = OTHER; note = 2'-O-methyladenosine-3'-phosphate
  modified_base 4: mod_base = OTHER; note = 2'-O-methyluridine-3'-phosphate
  modified_base 5: mod_base = OTHER; note = 2'-O-methylcytidine-3'-phosphate
  modified_base 6: mod_base = OTHER; note = 2'-fluorocytidine-3'-phosphate
  modified_base 7: mod_base = OTHER; note = 2'-O-methylcytidine-3'-phosphate
  modified_base 8: mod_base = OTHER; note = 2'-fluoroadenosine-3'-phosphate
  modified_base 9: mod_base = OTHER; note = 2'-fluorouridine-3'-phosphate
  modified_base 10: mod_base = OTHER; note = 2'-O-methyluridine-3'-phosphate
  modified_base 11: mod_base = OTHER; note = 2'-O-methylcytidine-3'-phosphate
  modified_base 12: mod_base = OTHER; note = 2'-O-methyladenosine-3'-phosphate
  modified_base 13: mod_base = OTHER; note = 2'-O-methyladenosine-3'-phosphate
  modified_base 14: mod_base = OTHER; note = 2'-fluoroguanosine-3'-phosphate
  modified_base 15: mod_base = OTHER; note = 2'-O-methylcytidine-3'-phosphate
  modified_base 16: mod_base = OTHER; note = 2'-fluorocytidine-3'-phosphate
  modified_base 17: mod_base = OTHER; note = 2'-O-methyladenosine-3'-phosphate
  modified_base 18: mod_base = OTHER; note = 2'-O-methyluridine-3'-phosphate
  modified_base 19: mod_base = OTHER; note = 2'-O-methylguanosine-3'-phosphate
  modified_base 20: mod_base = OTHER; note = 2'-O-methyluridine-3'-phosphate
  modified_base 21: mod_base = OTHER; note = 2'-O-methyluridine-3'-phosphorothioate
  modified_base 22: mod_base = OTHER; note = 2'-O-methyluridine-3'-phosphorothioate
  modified_base 23: mod_base = OTHER; note = 2'-O-methyladenosine-3'-phosphate
agatcccattcaagccatgttta

SEQ ID NO: 2902 - RNA, 21 nt, synthetic construct
  misc_feature 1..21: note = Description of Artificial Sequence: Synthetic oligonucleotide
  source 1..21: mol_type = other RNA
  modified_base 1: mod_base = OTHER; note = 2'-O-methyluridine-3'-phosphorothioate
  modified_base 2: mod_base = OTHER; note = 2'-O-methylguanosine-3'- phosphorothioate
  modified_base 3: mod_base = OTHER; note = 2'-O-methyluridine-3'-phosphate
  modified_base 4: mod_base = OTHER; note = 2'-O-methyluridine-3'-phosphate
  modified_base 5: mod_base = OTHER; note = 2'-O-methyladenosine-3'-phosphate
  modified_base 6: mod_base = OTHER; note = 2'-O-methyladenosine-3'-phosphate
  modified_base 7: mod_base = OTHER; note = 2'-fluoroadenosine-3'-phosphate
  modified_base 8: mod_base = OTHER; note = 2'-O-methylcytidine-3'-phosphate
  modified_base 9: mod_base = OTHER; note = 2'-fluoroadenosine-3'-phosphate
  modified_base 10: mod_base = OTHER; note = 2'-fluorouridine-3'-phosphate
  modified_base 11: mod_base = OTHER; note = 2'-fluoroguanosine-3'-phosphate
  modified_base 12: mod_base = OTHER; note = 2'-O-methylguanosine-3'-phosphate
  modified_base 13: mod_base = OTHER; note = 2'-O-methylcytidine-3'-phosphate
  modified_base 14: mod_base = OTHER; note = 2'-O-methyluridine-3'-phosphate
  modified_base 15: mod_base = OTHER; note = 2'-O-methyluridine-3'-phosphate
  modified_base 16: mod_base = OTHER; note = 2'-O-methylguanosine-3'-phosphate
  modified_base 17: mod_base = OTHER; note = 2'-O-methyladenosine-3'-phosphate
  modified_base 18: mod_base = OTHER; note = 2'-O-methyladenosine-3'-phosphate
  modified_base 19: mod_base = OTHER; note = 2'-O-methyluridine-3'-phosphate
  modified_base 20: mod_base = OTHER; note = 2'-O-methylguanosine-3'-phosphate
  modified_base 21: mod_base = OTHER; note = 2'-O-methylguanosine-3'-phosphate attached to N-[tris(N-acetylgalactosamine-alkyl)-amidodecanoyl)]-4-hydr oxyprolinol Hyp-(N-acetylgalactosamine-alkyl)3
tgttaaacatggcttgaatgg

SEQ ID NO: 2903 - RNA, 23 nt, synthetic construct
  misc_feature 1..23: note = Description of Artificial Sequence: Synthetic oligonucleotide
  source 1..23: mol_type = other RNA
  modified_base 1: mod_base = OTHER; note = 2'-O-methylcytidine-3'- phosphorothioate
  modified_base 2: mod_base = OTHER; note = 2'-fluorocytidine-3'-phosphorothioate
  modified_base 3: mod_base = OTHER; note = 2'-O-methyladenosine-3'-phosphate
  modified_base 4: mod_base = OTHER; note = 2'-O-methyluridine-3'-phosphate
  modified_base 5: mod_base = OTHER; note = 2'-O-methyluridine-3'-phosphate
  modified_base 6: mod_base = OTHER; note = 2'-fluorocytidine-3'-phosphate
  modified_base 7: mod_base = OTHER; note = 2'-O-methyladenosine-3'-phosphate
  modified_base 8: mod_base = OTHER; note = 2'-fluoroadenosine-3'-phosphate
  modified_base 9: mod_base = OTHER; note = 2'-fluoroguanosine-3'-phosphate
  modified_base 10: mod_base = OTHER; note = 2'-O-methylcytidine-3'-phosphate
  modified_base 11: mod_base = OTHER; note = 2'-O-methylcytidine-3'-phosphate
  modified_base 12: mod_base = OTHER; note = 2'-O-methyladenosine-3'-phosphate
  modified_base 13: mod_base = OTHER; note = 2'-O-methyluridine-3'-phosphate
  modified_base 14: mod_base = OTHER; note = 2'-fluoroguanosine-3'-phosphate
  modified_base 15: mod_base = OTHER; note = 2'-O-methyluridine-3'-phosphate
  modified_base 16: mod_base = OTHER; note = 2'-fluorouridine-3'-phosphate
  modified_base 17: mod_base = OTHER; note = 2'-O-methyluridine-3'-phosphate
  modified_base 18: mod_base = OTHER; note = 2'-O-methyladenosine-3'-phosphate
  modified_base 19: mod_base = OTHER; note = 2'-O-methyladenosine-3'-phosphate
  modified_base 20: mod_base = OTHER; note = 2'-O-methylcytidine-3'-phosphate
  modified_base 21: mod_base = OTHER; note = 2'-O-methyladenosine-3'- phosphorothioate
  modified_base 22: mod_base = OTHER; note = 2'-O-methylguanosine-3'- phosphorothioate
  modified_base 23: mod_base = OTHER; note = 2'-O-methylcytidine-3'-phosphate
ccattcaagccatgtttaacagc

SEQ ID NO: 2904 - RNA, 21 nt, synthetic construct
  misc_feature 1..21: note = Description of Artificial Sequence: Synthetic oligonucleotide
  source 1..21: mol_type = other RNA
  modified_base 1: mod_base = OTHER; note = 2'-O-methylcytidine-3'- phosphorothioate
  modified_base 2: mod_base = OTHER; note = 2'-O-methyluridine-3'-phosphorothioate
  modified_base 3: mod_base = OTHER; note = 2'-O-methylguanosine-3'-phosphate
  modified_base 4: mod_base = OTHER; note = 2'-O-methyluridine-3'-phosphate
  modified_base 5: mod_base = OTHER; note = 2'-O-methyluridine-3'-phosphate
  modified_base 6: mod_base = OTHER; note = 2'-O-methyladenosine-3'-phosphate
  modified_base 7: mod_base = OTHER; note = 2'-fluoroadenosine-3'-phosphate
  modified_base 8: mod_base = OTHER; note = 2'-O-methyladenosine-3'-phosphate
  modified_base 9: mod_base = OTHER; note = 2'-fluorocytidine-3'-phosphate
  modified_base 10: mod_base = OTHER; note = 2'-fluoroadenosine-3'-phosphate
  modified_base 11: mod_base = OTHER; note = 2'-fluorouridine-3'-phosphate
  modified_base 12: mod_base = OTHER; note = 2'-O-methylguanosine-3'-phosphate
  modified_base 13: mod_base = OTHER; note = 2'-O-methylguanosine-3'-phosphate
  modified_base 14: mod_base = OTHER; note = 2'-O-methylcytidine-3'-phosphate
  modified_base 15: mod_base = OTHER; note = 2'-O-methyluridine-3'-phosphate
  modified_base 16: mod_base = OTHER; note = 2'-O-methyluridine-3'-phosphate
  modified_base 17: mod_base = OTHER; note = 2'-O-methylguanosine-3'-phosphate
  modified_base 18: mod_base = OTHER; note = 2'-O-methyladenosine-3'-phosphate
  modified_base 19: mod_base = OTHER; note = 2'-O-methyladenosine-3'-phosphate
  modified_base 20: mod_base = OTHER; note = 2'-O-methyluridine-3'-phosphate
  modified_base 21: mod_base = OTHER; note = 2'-O-methylguanosine-3'-phosphate attached to N-[tris(N-acetylgalactosamine-alkyl)-amidodecanoyl)]-4-hydr oxyprolinol Hyp-(N-acetylgalactosamine-alkyl)3
ctgttaaacatggcttgaatg

SEQ ID NO: 2905 - RNA, 23 nt, synthetic construct
  misc_feature 1..23: note = Description of Artificial Sequence: Synthetic oligonucleotide
  source 1..23: mol_type = other RNA
  modified_base 1: mod_base = OTHER; note = 2'-O-methylcytidine-3'- phosphorothioate
  modified_base 2: mod_base = OTHER; note = 2'-fluoroadenosine-3'-phosphorothioate
  modified_base 3: mod_base = OTHER; note = 2'-O-methyluridine-3'-phosphate
  modified_base 4: mod_base = OTHER; note = 2'-O-methyluridine-3'-phosphate
  modified_base 5: mod_base = OTHER; note = 2'-O-methylcytidine-3'-phosphate
  modified_base 6: mod_base = OTHER; note = 2'-fluoroadenosine-3'-phosphate
  modified_base 7: mod_base = OTHER; note = 2'-O-methyladenosine-3'-phosphate
  modified_base 8: mod_base = OTHER; note = 2'-fluoroguanosine-3'-phosphate
  modified_base 9: mod_base = OTHER; note = 2'-fluorocytidine-3'-phosphate
  modified_base 10: mod_base = OTHER; note = 2'-O-methylcytidine-3'-phosphate
  modified_base 11: mod_base = OTHER; note = 2'-O-methyladenosine-3'-phosphate
  modified_base 12: mod_base = OTHER; note = 2'-O-methyluridine-3'-phosphate
  modified_base 13: mod_base = OTHER; note = 2'-O-methylguanosine-3'-phosphate
  modified_base 14: mod_base = OTHER; note = 2'-fluorouridine-3'-phosphate
  modified_base 15: mod_base = OTHER; note = 2'-O-methyluridine-3'-phosphate
  modified_base 16: mod_base = OTHER; note = 2'-fluorouridine-3'-phosphate
  modified_base 17: mod_base = OTHER; note = 2'-O-methyladenosine-3'-phosphate
  modified_base 18: mod_base = OTHER; note = 2'-O-methyladenosine-3'-phosphate
  modified_base 19: mod_base = OTHER; note = 2'-O-methylcytidine-3'-phosphate
  modified_base 20: mod_base = OTHER; note = 2'-O-methyladenosine-3'-phosphate
  modified_base 21: mod_base = OTHER; note = 2'-O-methylguanosine-3'- phosphorothioate
  modified_base 22: mod_base = OTHER; note = 2'-O-methylcytidine-3'- phosphorothioate
  modified_base 23: mod_base = OTHER; note = 2'-O-methylcytidine-3'-phosphate
cattcaagccatgtttaacagcc

SEQ ID NO: 2906 - RNA, 21 nt, synthetic construct
  misc_feature 1..21: note = Description of Artificial Sequence: Synthetic oligonucleotide
  source 1..21: mol_type = other RNA
  modified_base 1: mod_base = OTHER; note = 2'-O-methylguanosine-3'- phosphorothioate
  modified_base 2: mod_base = OTHER; note = 2'-O-methyladenosine-3'- phosphorothioate
  modified_base 3: mod_base = OTHER; note = 2'-O-methylcytidine-3'-phosphate
  modified_base 4: mod_base = OTHER; note = 2'-O-methyluridine-3'-phosphate
  modified_base 5: mod_base = OTHER; note = 2'-O-methyluridine-3'-phosphate
  modified_base 6: mod_base = OTHER; note = 2'-O-methylguanosine-3'-phosphate
  modified_base 7: mod_base = OTHER; note = 2'-fluorocytidine-3'-phosphate
  modified_base 8: mod_base = OTHER; note = 2'-O-methyluridine-3'-phosphate
  modified_base 9: mod_base = OTHER; note = 2'-fluoroguanosine-3'-phosphate
  modified_base 10: mod_base = OTHER; note = 2'-fluorocytidine-3'-phosphate
  modified_base 11: mod_base = OTHER; note = 2'-fluoroadenosine-3'-phosphate
  modified_base 12: mod_base = OTHER; note = 2'-O-methyluridine-3'-phosphate
  modified_base 13: mod_base = OTHER; note = 2'-O-methyladenosine-3'-phosphate
  modified_base 14: mod_base = OTHER; note = 2'-O-methyluridine-3'-phosphate
  modified_base 15: mod_base = OTHER; note = 2'-O-methylguanosine-3'-phosphate
  modified_base 16: mod_base = OTHER; note = 2'-O-methyluridine-3'-phosphate
  modified_base 17: mod_base = OTHER; note = 2'-O-methylguanosine-3'-phosphate
  modified_base 18: mod_base = OTHER; note = 2'-O-methylguanosine-3'-phosphate
  modified_base 19: mod_base = OTHER; note = 2'-O-methylcytidine-3'-phosphate
  modified_base 20: mod_base = OTHER; note = 2'-O-methyluridine-3'-phosphate
  modified_base 21: mod_base = OTHER; note = 2'-O-methyladenosine-3'-phosphate attached to N-[tris(N-acetylgalactosamine-alkyl)-amidodecanoyl)]-4-hydr oxyprolinol Hyp-(N-acetylgalactosamine-alkyl)3
gacttgctgcatatgtggcta

SEQ ID NO: 2907 - RNA, 23 nt, synthetic construct
  misc_feature 1..23: note = Description of Artificial Sequence: Synthetic oligonucleotide
  source 1..23: mol_type = other RNA
  modified_base 1: mod_base = OTHER; note = 2'-O-methyluridine-3'-phosphorothioate
  modified_base 2: mod_base = OTHER; note = 2'-fluoroadenosine-3'-phosphorothioate
  modified_base 3: mod_base = OTHER; note = 2'-O-methylguanosine-3'-phosphate
  modified_base 4: mod_base = OTHER; note = 2'-O-methylcytidine-3'-phosphate
  modified_base 5: mod_base = OTHER; note = 2'-O-methylcytidine-3'-phosphate
  modified_base 6: mod_base = OTHER; note = 2'-fluoroadenosine-3'-phosphate
  modified_base 7: mod_base = OTHER; note = 2'-O-methylcytidine-3'-phosphate
  modified_base 8: mod_base = OTHER; note = 2'-fluoroadenosine-3'-phosphate
  modified_base 9: mod_base = OTHER; note = 2'-fluorouridine-3'-phosphate
  modified_base 10: mod_base = OTHER; note = 2'-O-methyladenosine-3'-phosphate
  modified_base 11: mod_base = OTHER; note = 2'-O-methyluridine-3'-phosphate
  modified_base 12: mod_base = OTHER; note = 2'-O-methylguanosine-3'-phosphate
  modified_base 13: mod_base = OTHER; note = 2'-O-methylcytidine-3'-phosphate
  modified_base 14: mod_base = OTHER; note = 2'-fluoroadenosine-3'-phosphate
  modified_base 15: mod_base = OTHER; note = 2'-O-methylguanosine-3'-phosphate
  modified_base 16: mod_base = OTHER; note = 2'-fluorocytidine-3'-phosphate
  modified_base 17: mod_base = OTHER; note = 2'-O-methyladenosine-3'-phosphate
  modified_base 18: mod_base = OTHER; note = 2'-O-methyladenosine-3'-phosphate
  modified_base 19: mod_base = OTHER; note = 2'-O-methylguanosine-3'-phosphate
  modified_base 20: mod_base = OTHER; note = 2'-O-methyluridine-3'-phosphate
  modified_base 21: mod_base = OTHER; note = 2'-O-methylcytidine-3'- phosphorothioate
  modified_base 22: mod_base = OTHER; note = 2'-O-methylcytidine-3'- phosphorothioate
  modified_base 23: mod_base = OTHER; note = 2'-O-methyladenosine-3'-phosphate
tagccacatatgcagcaagtcca

SEQ ID NO: 2908 - RNA, 21 nt, synthetic construct
  misc_feature 1..21: note = Description of Artificial Sequence: Synthetic oligonucleotide
  source 1..21: mol_type = other RNA
  modified_base 1: mod_base = OTHER; note = 2'-O-methyladenosine-3'- phosphorothioate
  modified_base 2: mod_base = OTHER; note = 2'-O-methylcytidine-3'- phosphorothioate
  modified_base 3: mod_base = OTHER; note = 2'-O-methyluridine-3'-phosphate
  modified_base 4: mod_base = OTHER; note = 2'-O-methyluridine-3'-phosphate
  modified_base 5: mod_base = OTHER; note = 2'-O-methylguanosine-3'-phosphate
  modified_base 6: mod_base = OTHER; note = 2'-O-methylcytidine-3'-phosphate
  modified_base 7: mod_base = OTHER; note = 2'-fluorouridine-3'-phosphate
  modified_base 8: mod_base = OTHER; note = 2'-O-methylguanosine-3'-phosphate
  modified_base 9: mod_base = OTHER; note = 2'-fluorocytidine-3'-phosphate
  modified_base 10: mod_base = OTHER; note = 2'-fluoroadenosine-3'-phosphate
  modified_base 11: mod_base = OTHER; note = 2'-fluorouridine-3'-phosphate
  modified_base 12: mod_base = OTHER; note = 2'-O-methyladenosine-3'-phosphate
  modified_base 13: mod_base = OTHER; note = 2'-O-methyluridine-3'-phosphate
  modified_base 14: mod_base = OTHER; note = 2'-O-methylguanosine-3'-phosphate
  modified_base 15: mod_base = OTHER; note = 2'-O-methyluridine-3'-phosphate
  modified_base 16: mod_base = OTHER; note = 2'-O-methylguanosine-3'-phosphate
  modified_base 17: mod_base = OTHER; note = 2'-O-methylguanosine-3'-phosphate
  modified_base 18: mod_base = OTHER; note = 2'-O-methylcytidine-3'-phosphate
  modified_base 19: mod_base = OTHER; note = 2'-O-methyluridine-3'-phosphate
  modified_base 20: mod_base = OTHER; note = 2'-O-methyladenosine-3'-phosphate
  modified_base 21: mod_base = OTHER; note = 2'-O-methyladenosine-3'-phosphate attached to N-[tris(N-acetylgalactosamine-alkyl)-amidodecanoyl)]-4-hydr oxyprolinol Hyp-(N-acetylgalactosamine-alkyl)3
acttgctgcatatgtggctaa

SEQ ID NO: 2909 - RNA, 23 nt, synthetic construct
  misc_feature 1..23: note = Description of Artificial Sequence: Synthetic oligonucleotide
  source 1..23: mol_type = other RNA
  modified_base 1: mod_base = OTHER; note = 2'-O-methyluridine-3'-phosphorothioate
  modified_base 2: mod_base = OTHER; note = 2'-fluorouridine -3'-phosphorothioate
  modified_base 3: mod_base = OTHER; note = 2'-O-methyladenosine-3'-phosphate
  modified_base 4: mod_base = OTHER; note = 2'-O-methylguanosine-3'-phosphate
  modified_base 5: mod_base = OTHER; note = 2'-O-methylcytidine-3'-phosphate
  modified_base 6: mod_base = OTHER; note = 2'-fluorocytidine-3'-phosphate
  modified_base 7: mod_base = OTHER; note = 2'-O-methyladenosine-3'-phosphate
  modified_base 8: mod_base = OTHER; note = 2'-fluorocytidine-3'-phosphate
  modified_base 9: mod_base = OTHER; note = 2'-fluoroadenosine-3'-phosphate
  modified_base 10: mod_base = OTHER; note = 2'-O-methyluridine-3'-phosphate
  modified_base 11: mod_base = OTHER; note = 2'-O-methyladenosine-3'-phosphate
  modified_base 12: mod_base = OTHER; note = 2'-O-methyluridine-3'-phosphate
  modified_base 13: mod_base = OTHER; note = 2'-O-methylguanosine-3'-phosphate
  modified_base 14: mod_base = OTHER; note = 2'-fluorocytidine-3'-phosphate
  modified_base 15: mod_base = OTHER; note = 2'-O-methyladenosine-3'-phosphate
  modified_base 16: mod_base = OTHER; note = 2'-fluoroguanosine-3'-phosphate
  modified_base 17: mod_base = OTHER; note = 2'-O-methylcytidine-3'-phosphate
  modified_base 18: mod_base = OTHER; note = 2'-O-methyladenosine-3'-phosphate
  modified_base 19: mod_base = OTHER; note = 2'-O-methyladenosine-3'-phosphate
  modified_base 20: mod_base = OTHER; note = 2'-O-methylguanosine-3'-phosphate
  modified_base 21: mod_base = OTHER; note = 2'-O-methyluridine-3'-phosphorothioate
  modified_base 22: mod_base = OTHER; note = 2'-O-methylcytidine-3'- phosphorothioate
  modified_base 23: mod_base = OTHER; note = 2'-O-methylcytidine-3'-phosphate
ttagccacatatgcagcaagtcc

SEQ ID NO: 2910 - RNA, 21 nt, synthetic construct
  misc_feature 1..21: note = Description of Artificial Sequence: Synthetic oligonucleotide
  source 1..21: mol_type = other RNA
  modified_base 1: mod_base = OTHER; note = 2'-O-methyladenosine-3'- phosphorothioate
  modified_base 2: mod_base = OTHER; note = 2'-O-methylguanosine-3'- phosphorothioate
  modified_base 3: mod_base = OTHER; note = 2'-O-methyluridine-3'-phosphate
  modified_base 4: mod_base = OTHER; note = 2'-O-methylguanosine-3'-phosphate
  modified_base 5: mod_base = OTHER; note = 2'-O-methylguanosine-3'-phosphate
  modified_base 6: mod_base = OTHER; note = 2'-O-methyladenosine-3'-phosphate
  modified_base 7: mod_base = OTHER; note = 2'-fluorocytidine-3'-phosphate
  modified_base 8: mod_base = OTHER; note = 2'-O-methyluridine-3'-phosphate
  modified_base 9: mod_base = OTHER; note = 2'-fluorouridine-3'-phosphate
  modified_base 10: mod_base = OTHER; note = 2'-fluoroguanosine-3'-phosphate
  modified_base 11: mod_base = OTHER; note = 2'-fluorocytidine-3'-phosphate
  modified_base 12: mod_base = OTHER; note = 2'-O-methyluridine-3'-phosphate
  modified_base 13: mod_base = OTHER; note = 2'-O-methylguanosine-3'-phosphate
  modified_base 14: mod_base = OTHER; note = 2'-O-methylcytidine-3'-phosphate
  modified_base 15: mod_base = OTHER; note = 2'-O-methyladenosine-3'-phosphate
  modified_base 16: mod_base = OTHER; note = 2'-O-methyluridine-3'-phosphate
  modified_base 17: mod_base = OTHER; note = 2'-O-methyladenosine-3'-phosphate
  modified_base 18: mod_base = OTHER; note = 2'-O-methyluridine-3'-phosphate
  modified_base 19: mod_base = OTHER; note = 2'-O-methylguanosine-3'-phosphate
  modified_base 20: mod_base = OTHER; note = 2'-O-methyluridine-3'-phosphate
  modified_base 21: mod_base = OTHER; note = 2'-O-methylguanosine-3'-phosphate attached to N-[tris(N-acetylgalactosamine-alkyl)-amidodecanoyl)]-4-hydr oxyprolinol Hyp-(N-acetylgalactosamine-alkyl)3
agtggacttgctgcatatgtg

SEQ ID NO: 2911 - RNA, 23 nt, synthetic construct
  misc_feature 1..23: note = Description of Artificial Sequence: Synthetic oligonucleotide
  source 1..23: mol_type = other RNA
  modified_base 1: mod_base = OTHER; note = 2'-O-methylcytidine-3'- phosphorothioate
  modified_base 2: mod_base = OTHER; note = 2'-fluoroadenosine-3'-phosphorothioate
  modified_base 3: mod_base = OTHER; note = 2'-O-methylcytidine-3'-phosphate
  modified_base 4: mod_base = OTHER; note = 2'-O-methyladenosine-3'-phosphate
  modified_base 5: mod_base = OTHER; note = 2'-O-methyluridine-3'-phosphate
  modified_base 6: mod_base = OTHER; note = 2'-fluoroadenosine-3'-phosphate
  modified_base 7: mod_base = OTHER; note = 2'-O-methyluridine-3'-phosphate
  modified_base 8: mod_base = OTHER; note = 2'-fluoroguanosine-3'-phosphate
  modified_base 9: mod_base = OTHER; note = 2'-fluorocytidine-3'-phosphate
  modified_base 10: mod_base = OTHER; note = 2'-O-methyladenosine-3'-phosphate
  modified_base 11: mod_base = OTHER; note = 2'-O-methylguanosine-3'-phosphate
  modified_base 12: mod_base = OTHER; note = 2'-O-methylcytidine-3'-phosphate
  modified_base 13: mod_base = OTHER; note = 2'-O-methyladenosine-3'-phosphate
  modified_base 14: mod_base = OTHER; note = 2'-fluoroadenosine-3'-phosphate
  modified_base 15: mod_base = OTHER; note = 2'-O-methylguanosine-3'-phosphate
  modified_base 16: mod_base = OTHER; note = 2'-fluorouridine-3'-phosphate
  modified_base 17: mod_base = OTHER; note = 2'-O-methylcytidine-3'-phosphate
  modified_base 18: mod_base = OTHER; note = 2'-O-methylcytidine-3'-phosphate
  modified_base 19: mod_base = OTHER; note = 2'-O-methyladenosine-3'-phosphate
  modified_base 20: mod_base = OTHER; note = 2'-O-methylcytidine-3'-phosphate
  modified_base 21: mod_base = OTHER; note = 2'-O-methyluridine-3'-phosphorothioate
  modified_base 22: mod_base = OTHER; note = 2'-O-methylguanosine-3'- phosphorothioate
  modified_base 23: mod_base = OTHER; note = 2'-O-methyluridine-3'-phosphate
cacatatgcagcaagtccactgt

SEQ ID NO: 2912 - RNA, 21 nt, synthetic construct
  misc_feature 1..21: note = Description of Artificial Sequence: Synthetic oligonucleotide
  source 1..21: mol_type = other RNA
  modified_base 1: mod_base = OTHER; note = 2'-O-methylcytidine-3'- phosphorothioate
  modified_base 2: mod_base = OTHER; note = 2'-O-methyladenosine-3'- phosphorothioate
  modified_base 3: mod_base = OTHER; note = 2'-O-methylguanosine-3'-phosphate
  modified_base 4: mod_base = OTHER; note = 2'-O-methyluridine-3'-phosphate
  modified_base 5: mod_base = OTHER; note = 2'-O-methylguanosine-3'-phosphate
  modified_base 6: mod_base = OTHER; note = 2'-O-methylguanosine-3'-phosphate
  modified_base 7: mod_base = OTHER; note = 2'-fluoroadenosine-3'-phosphate
  modified_base 8: mod_base = OTHER; note = 2'-O-methylcytidine-3'-phosphate
  modified_base 9: mod_base = OTHER; note = 2'-fluorouridine-3'-phosphate
  modified_base 10: mod_base = OTHER; note = 2'-fluorouridine-3'-phosphate
  modified_base 11: mod_base = OTHER; note = 2'-fluoroguanosine-3'-phosphate
  modified_base 12: mod_base = OTHER; note = 2'-O-methylcytidine-3'-phosphate
  modified_base 13: mod_base = OTHER; note = 2'-O-methyluridine-3'-phosphate
  modified_base 14: mod_base = OTHER; note = 2'-O-methylguanosine-3'-phosphate
  modified_base 15: mod_base = OTHER; note = 2'-O-methylcytidine-3'-phosphate
  modified_base 16: mod_base = OTHER; note = 2'-O-methyladenosine-3'-phosphate
  modified_base 17: mod_base = OTHER; note = 2'-O-methyluridine-3'-phosphate
  modified_base 18: mod_base = OTHER; note = 2'-O-methyladenosine-3'-phosphate
  modified_base 19: mod_base = OTHER; note = 2'-O-methyluridine-3'-phosphate
  modified_base 20: mod_base = OTHER; note = 2'-O-methylguanosine-3'-phosphate
  modified_base 21: mod_base = OTHER; note = 2'-O-methyluridine-3'-phosphate attached to N-[tris(N-acetylgalactosamine-alkyl)-amidodecanoyl)]-4-hydr oxyprolinol Hyp-(N-acetylgalactosamine-alkyl)3
cagtggacttgctgcatatgt

SEQ ID NO: 2913 - RNA, 23 nt, synthetic construct
  misc_feature 1..23: note = Description of Artificial Sequence: Synthetic oligonucleotide
  source 1..23: mol_type = other RNA
  modified_base 1: mod_base = OTHER; note = 2'-O-methyladenosine-3'- phosphorothioate
  modified_base 2: mod_base = OTHER; note = 2'-fluorocytidine-3'-phosphorothioate
  modified_base 3: mod_base = OTHER; note = 2'-O-methyladenosine-3'-phosphate
  modified_base 4: mod_base = OTHER; note = 2'-O-methyluridine-3'-phosphate
  modified_base 5: mod_base = OTHER; note = 2'-O-methyladenosine-3'-phosphate
  modified_base 6: mod_base = OTHER; note = 2'-fluorouridine-3'-phosphate
  modified_base 7: mod_base = OTHER; note = 2'-O-methylguanosine-3'-phosphate
  modified_base 8: mod_base = OTHER; note = 2'-fluorocytidine-3'-phosphate
  modified_base 9: mod_base = OTHER; note = 2'-fluoroadenosine-3'-phosphate
  modified_base 10: mod_base = OTHER; note = 2'-O-methylguanosine-3'-phosphate
  modified_base 11: mod_base = OTHER; note = 2'-O-methylcytidine-3'-phosphate
  modified_base 12: mod_base = OTHER; note = 2'-O-methyladenosine-3'-phosphate
  modified_base 13: mod_base = OTHER; note = 2'-O-methyladenosine-3'-phosphate
  modified_base 14: mod_base = OTHER; note = 2'-fluoroguanosine-3'-phosphate
  modified_base 15: mod_base = OTHER; note = 2'-O-methyluridine-3'-phosphate
  modified_base 16: mod_base = OTHER; note = 2'-fluorocytidine-3'-phosphate
  modified_base 17: mod_base = OTHER; note = 2'-O-methylcytidine-3'-phosphate
  modified_base 18: mod_base = OTHER; note = 2'-O-methyladenosine-3'-phosphate
  modified_base 19: mod_base = OTHER; note = 2'-O-methylcytidine-3'-phosphate
  modified_base 20: mod_base = OTHER; note = 2'-O-methyluridine-3'-phosphate
  modified_base 21: mod_base = OTHER; note = 2'-O-methylguanosine-3'- phosphorothioate
  modified_base 22: mod_base = OTHER; note = 2'-O-methyluridine-3'-phosphorothioate
  modified_base 23: mod_base = OTHER; note = 2'-O-methylcytidine-3'-phosphate
acatatgcagcaagtccactgtc

SEQ ID NO: 2914 - RNA, 21 nt, synthetic construct
  misc_feature 1..21: note = Description of Artificial Sequence: Synthetic oligonucleotide
  source 1..21: mol_type = other RNA
  modified_base 1: mod_base = OTHER; note = 2'-O-methyluridine-3'-phosphorothioate
  modified_base 2: mod_base = OTHER; note = 2'-O-methyladenosine-3'- phosphorothioate
  modified_base 3: mod_base = OTHER; note = 2'-O-methyladenosine-3'-phosphate
  modified_base 4: mod_base = OTHER; note = 2'-O-methyladenosine-3'-phosphate
  modified_base 5: mod_base = OTHER; note = 2'-O-methyluridine-3'-phosphate
  modified_base 6: mod_base = OTHER; note = 2'-O-methylcytidine-3'-phosphate
  modified_base 7: mod_base = OTHER; note = 2'-fluoroadenosine-3'-phosphate
  modified_base 8: mod_base = OTHER; note = 2'-O-methylguanosine-3'-phosphate
  modified_base 9: mod_base = OTHER; note = 2'-fluorouridine-3'-phosphate
  modified_base 10: mod_base = OTHER; note = 2'-fluoroadenosine-3'-phosphate
  modified_base 11: mod_base = OTHER; note = 2'-fluorocytidine-3'-phosphate
  modified_base 12: mod_base = OTHER; note = 2'-O-methyluridine-3'-phosphate
  modified_base 13: mod_base = OTHER; note = 2'-O-methyluridine-3'-phosphate
  modified_base 14: mod_base = OTHER; note = 2'-O-methylcytidine-3'-phosphate
  modified_base 15: mod_base = OTHER; note = 2'-O-methylcytidine-3'-phosphate
  modified_base 16: mod_base = OTHER; note = 2'-O-methyladenosine-3'-phosphate
  modified_base 17: mod_base = OTHER; note = 2'-O-methyladenosine-3'-phosphate
  modified_base 18: mod_base = OTHER; note = 2'-O-methyladenosine-3'-phosphate
  modified_base 19: mod_base = OTHER; note = 2'-O-methylguanosine-3'-phosphate
  modified_base 20: mod_base = OTHER; note = 2'-O-methyluridine-3'-phosphate
  modified_base 21: mod_base = OTHER; note = 2'-O-methylcytidine-3'-phosphate attached to N-[tris(N-acetylgalactosamine-alkyl)-amidodecanoyl)]-4-hydr oxyprolinol Hyp-(N-acetylgalactosamine-alkyl)3
taaatcagtacttccaaagtc

SEQ ID NO: 2915 - RNA, 23 nt, synthetic construct
  misc_feature 1..23: note = Description of Artificial Sequence: Synthetic oligonucleotide
  source 1..23: mol_type = other RNA
  modified_base 1: mod_base = OTHER; note = 2'-O-methylguanosine-3'- phosphorothioate
  modified_base 2: mod_base = OTHER; note = 2'-fluoroadenosine-3'-phosphorothioate
  modified_base 3: mod_base = OTHER; note = 2'-O-methylcytidine-3'-phosphate
  modified_base 4: mod_base = OTHER; note = 2'-O-methyluridine-3'-phosphate
  modified_base 5: mod_base = OTHER; note = 2'-O-methyluridine-3'-phosphate
  modified_base 6: mod_base = OTHER; note = 2'-fluorouridine-3'-phosphate
  modified_base 7: mod_base = OTHER; note = 2'-O-methylguanosine-3'-phosphate
  modified_base 8: mod_base = OTHER; note = 2'-fluoroguanosine-3'-phosphate
  modified_base 9: mod_base = OTHER; note = 2'-fluoroadenosine-3'-phosphate
  modified_base 10: mod_base = OTHER; note = 2'-O-methyladenosine-3'-phosphate
  modified_base 11: mod_base = OTHER; note = 2'-O-methylguanosine-3'-phosphate
  modified_base 12: mod_base = OTHER; note = 2'-O-methyluridine-3'-phosphate
  modified_base 13: mod_base = OTHER; note = 2'-O-methyladenosine-3'-phosphate
  modified_base 14: mod_base = OTHER; note = 2'-fluorocytidine-3'-phosphate
  modified_base 15: mod_base = OTHER; note = 2'-O-methyluridine-3'-phosphate
  modified_base 16: mod_base = OTHER; note = 2'-fluoroguanosine-3'-phosphate
  modified_base 17: mod_base = OTHER; note = 2'-O-methyladenosine-3'-phosphate
  modified_base 18: mod_base = OTHER; note = 2'-O-methyluridine-3'-phosphate
  modified_base 19: mod_base = OTHER; note = 2'-O-methyluridine-3'-phosphate
  modified_base 20: mod_base = OTHER; note = 2'-O-methyluridine-3'-phosphate
  modified_base 21: mod_base = OTHER; note = 2'-O-methyladenosine-3'- phosphorothioate
  modified_base 22: mod_base = OTHER; note = 2'-O-methylguanosine-3'- phosphorothioate
  modified_base 23: mod_base = OTHER; note = 2'-O-methylcytidine-3'-phosphate
gactttggaagtactgatttagc

SEQ ID NO: 2916 - RNA, 21 nt, synthetic construct
  misc_feature 1..21: note = Description of Artificial Sequence: Synthetic oligonucleotide
  source 1..21: mol_type = other RNA
  modified_base 1: mod_base = OTHER; note = 2'-O-methyladenosine-3'- phosphorothioate
  modified_base 2: mod_base = OTHER; note = 2'-O-methyladenosine-3'- phosphorothioate
  modified_base 3: mod_base = OTHER; note = 2'-O-methyladenosine-3'-phosphate
  modified_base 4: mod_base = OTHER; note = 2'-O-methyluridine-3'-phosphate
  modified_base 5: mod_base = OTHER; note = 2'-O-methylcytidine-3'-phosphate
  modified_base 6: mod_base = OTHER; note = 2'-O-methyladenosine-3'-phosphate
  modified_base 7: mod_base = OTHER; note = 2'-fluoroguanosine-3'-phosphate
  modified_base 8: mod_base = OTHER; note = 2'-O-methyluridine-3'-phosphate
  modified_base 9: mod_base = OTHER; note = 2'-fluoroadenosine-3'-phosphate
  modified_base 10: mod_base = OTHER; note = 2'-fluorocytidine-3'-phosphate
  modified_base 11: mod_base = OTHER; note = 2'-fluorouridine-3'-phosphate
  modified_base 12: mod_base = OTHER; note = 2'-O-methyluridine-3'-phosphate
  modified_base 13: mod_base = OTHER; note = 2'-O-methylcytidine-3'-phosphate
  modified_base 14: mod_base = OTHER; note = 2'-O-methylcytidine-3'-phosphate
  modified_base 15: mod_base = OTHER; note = 2'-O-methyladenosine-3'-phosphate
  modified_base 16: mod_base = OTHER; note = 2'-O-methyladenosine-3'-phosphate
  modified_base 17: mod_base = OTHER; note = 2'-O-methyladenosine-3'-phosphate
  modified_base 18: mod_base = OTHER; note = 2'-O-methylguanosine-3'-phosphate
  modified_base 19: mod_base = OTHER; note = 2'-O-methyluridine-3'-phosphate
  modified_base 20: mod_base = OTHER; note = 2'-O-methylcytidine-3'-phosphate
  modified_base 21: mod_base = OTHER; note = 2'-O-methyluridine-3'-phosphate attached to N-[tris(N-acetylgalactosamine-alkyl)-amidodecanoyl)]-4-hydr oxyprolinol Hyp-(N-acetylgalactosamine-alkyl)3
aaatcagtacttccaaagtct

SEQ ID NO: 2917 - RNA, 23 nt, synthetic construct
  misc_feature 1..23: note = Description of Artificial Sequence: Synthetic oligonucleotide
  source 1..23: mol_type = other RNA
  modified_base 1: mod_base = OTHER; note = 2'-O-methyladenosine-3'- phosphorothioate
  modified_base 2: mod_base = OTHER; note = 2'-fluoroguanosine-3'-phosphorothioate
  modified_base 3: mod_base = OTHER; note = 2'-O-methyladenosine-3'-phosphate
  modified_base 4: mod_base = OTHER; note = 2'-O-methylcytidine-3'-phosphate
  modified_base 5: mod_base = OTHER; note = 2'-O-methyluridine-3'-phosphate
  modified_base 6: mod_base = OTHER; note = 2'-fluorouridine-3'-phosphate
  modified_base 7: mod_base = OTHER; note = 2'-O-methyluridine-3'-phosphate
  modified_base 8: mod_base = OTHER; note = 2'-fluoroguanosine-3'-phosphate
  modified_base 9: mod_base = OTHER; note = 2'-fluoroguanosine-3'-phosphate
  modified_base 10: mod_base = OTHER; note = 2'-O-methyladenosine-3'-phosphate
  modified_base 11: mod_base = OTHER; note = 2'-O-methyladenosine-3'-phosphate
  modified_base 12: mod_base = OTHER; note = 2'-O-methylguanosine-3'-phosphate
  modified_base 13: mod_base = OTHER; note = 2'-O-methyluridine-3'-phosphate
  modified_base 14: mod_base = OTHER; note = 2'-fluoroadenosine-3'-phosphate
  modified_base 15: mod_base = OTHER; note = 2'-O-methylcytidine-3'-phosphate
  modified_base 16: mod_base = OTHER; note = 2'-fluorouridine-3'-phosphate
  modified_base 17: mod_base = OTHER; note = 2'-O-methylguanosine-3'-phosphate
  modified_base 18: mod_base = OTHER; note = 2'-O-methyladenosine-3'-phosphate
  modified_base 19: mod_base = OTHER; note = 2'-O-methyluridine-3'-phosphate
  modified_base 20: mod_base = OTHER; note = 2'-O-methyluridine-3'-phosphate
  modified_base 21: mod_base = OTHER; note = 2'-O-methyluridine-3'-phosphorothioate
  modified_base 22: mod_base = OTHER; note = 2'-O-methyladenosine-3'- phosphorothioate
  modified_base 23: mod_base = OTHER; note = 2'-O-methylguanosine-3'-phosphate
agactttggaagtactgatttag

SEQ ID NO: 2918 - RNA, 21 nt, synthetic construct
  misc_feature 1..21: note = Description of Artificial Sequence: Synthetic oligonucleotide
  source 1..21: mol_type = other RNA
  modified_base 1: mod_base = OTHER; note = 2'-O-methyladenosine-3'- phosphorothioate
  modified_base 2: mod_base = OTHER; note = 2'-O-methyluridine-3'-phosphorothioate
  modified_base 3: mod_base = OTHER; note = 2'-O-methylguanosine-3'-phosphate
  modified_base 4: mod_base = OTHER; note = 2'-O-methylcytidine-3'-phosphate
  modified_base 5: mod_base = OTHER; note = 2'-O-methyluridine-3'-phosphate
  modified_base 6: mod_base = OTHER; note = 2'-O-methyladenosine-3'-phosphate
  modified_base 7: mod_base = OTHER; note = 2'-fluoroadenosine-3'-phosphate
  modified_base 8: mod_base = OTHER; note = 2'-O-methyladenosine-3'-phosphate
  modified_base 9: mod_base = OTHER; note = 2'-fluorouridine-3'-phosphate
  modified_base 10: mod_base = OTHER; note = 2'-fluorocytidine-3'-phosphate
  modified_base 11: mod_base = OTHER; note = 2'-fluoroadenosine-3'-phosphate
  modified_base 12: mod_base = OTHER; note = 2'-O-methylguanosine-3'-phosphate
  modified_base 13: mod_base = OTHER; note = 2'-O-methyluridine-3'-phosphate
  modified_base 14: mod_base = OTHER; note = 2'-O-methyladenosine-3'-phosphate
  modified_base 15: mod_base = OTHER; note = 2'-O-methylcytidine-3'-phosphate
  modified_base 16: mod_base = OTHER; note = 2'-O-methyluridine-3'-phosphate
  modified_base 17: mod_base = OTHER; note = 2'-O-methyluridine-3'-phosphate
  modified_base 18: mod_base = OTHER; note = 2'-O-methylcytidine-3'-phosphate
  modified_base 19: mod_base = OTHER; note = 2'-O-methylcytidine-3'-phosphate
  modified_base 20: mod_base = OTHER; note = 2'-O-methyladenosine-3'-phosphate
  modified_base 21: mod_base = OTHER; note = 2'-O-methyladenosine-3'-phosphate attached to N-[tris(N-acetylgalactosamine-alkyl)-amidodecanoyl)]-4-hydr oxyprolinol Hyp-(N-acetylgalactosamine-alkyl)3
atgctaaatcagtacttccaa

SEQ ID NO: 2919 - RNA, 23 nt, synthetic construct
  misc_feature 1..23: note = Description of Artificial Sequence: Synthetic oligonucleotide
  source 1..23: mol_type = other RNA
  modified_base 1: mod_base = OTHER; note = 2'-O-methyluridine-3'-phosphorothioate
  modified_base 2: mod_base = OTHER; note = 2'-fluorouridine -3'-phosphorothioate
  modified_base 3: mod_base = OTHER; note = 2'-O-methylguanosine-3'-phosphate
  modified_base 4: mod_base = OTHER; note = 2'-O-methylguanosine-3'-phosphate
  modified_base 5: mod_base = OTHER; note = 2'-O-methyladenosine-3'-phosphate
  modified_base 6: mod_base = OTHER; note = 2'-fluoroadenosine-3'-phosphate
  modified_base 7: mod_base = OTHER; note = 2'-O-methylguanosine-3'-phosphate
  modified_base 8: mod_base = OTHER; note = 2'-fluorouridine-3'-phosphate
  modified_base 9: mod_base = OTHER; note = 2'-fluoroadenosine-3'-phosphate
  modified_base 10: mod_base = OTHER; note = 2'-O-methylcytidine-3'-phosphate
  modified_base 11: mod_base = OTHER; note = 2'-O-methyluridine-3'-phosphate
  modified_base 12: mod_base = OTHER; note = 2'-O-methylguanosine-3'-phosphate
  modified_base 13: mod_base = OTHER; note = 2'-O-methyladenosine-3'-phosphate
  modified_base 14: mod_base = OTHER; note = 2'-fluorouridine-3'-phosphate
  modified_base 15: mod_base = OTHER; note = 2'-O-methyluridine-3'-phosphate
  modified_base 16: mod_base = OTHER; note = 2'-fluorouridine-3'-phosphate
  modified_base 17: mod_base = OTHER; note = 2'-O-methyladenosine-3'-phosphate
  modified_base 18: mod_base = OTHER; note = 2'-O-methylguanosine-3'-phosphate
  modified_base 19: mod_base = OTHER; note = 2'-O-methylcytidine-3'-phosphate
  modified_base 20: mod_base = OTHER; note = 2'-O-methyladenosine-3'-phosphate
  modified_base 21: mod_base = OTHER; note = 2'-O-methyluridine-3'-phosphorothioate
  modified_base 22: mod_base = OTHER; note = 2'-O-methylguanosine-3'- phosphorothioate
  modified_base 23: mod_base = OTHER; note = 2'-O-methyluridine-3'-phosphate
ttggaagtactgatttagcatgt

SEQ ID NO: 2920 - RNA, 21 nt, synthetic construct
  misc_feature 1..21: note = Description of Artificial Sequence: Synthetic oligonucleotide
  source 1..21: mol_type = other RNA
  modified_base 1: mod_base = OTHER; note = 2'-O-methylcytidine-3'- phosphorothioate
  modified_base 2: mod_base = OTHER; note = 2'-O-methyladenosine-3'- phosphorothioate
  modified_base 3: mod_base = OTHER; note = 2'-O-methyluridine-3'-phosphate
  modified_base 4: mod_base = OTHER; note = 2'-O-methylguanosine-3'-phosphate
  modified_base 5: mod_base = OTHER; note = 2'-O-methylcytidine-3'-phosphate
  modified_base 6: mod_base = OTHER; note = 2'-O-methyluridine-3'-phosphate
  modified_base 7: mod_base = OTHER; note = 2'-fluoroadenosine-3'-phosphate
  modified_base 8: mod_base = OTHER; note = 2'-O-methyladenosine-3'-phosphate
  modified_base 9: mod_base = OTHER; note = 2'-fluoroadenosine-3'-phosphate
  modified_base 10: mod_base = OTHER; note = 2'-fluorouridine-3'-phosphate
  modified_base 11: mod_base = OTHER; note = 2'-fluorocytidine-3'-phosphate
  modified_base 12: mod_base = OTHER; note = 2'-O-methyladenosine-3'-phosphate
  modified_base 13: mod_base = OTHER; note = 2'-O-methylguanosine-3'-phosphate
  modified_base 14: mod_base = OTHER; note = 2'-O-methyluridine-3'-phosphate
  modified_base 15: mod_base = OTHER; note = 2'-O-methyladenosine-3'-phosphate
  modified_base 16: mod_base = OTHER; note = 2'-O-methylcytidine-3'-phosphate
  modified_base 17: mod_base = OTHER; note = 2'-O-methyluridine-3'-phosphate
  modified_base 18: mod_base = OTHER; note = 2'-O-methyluridine-3'-phosphate
  modified_base 19: mod_base = OTHER; note = 2'-O-methylcytidine-3'-phosphate
  modified_base 20: mod_base = OTHER; note = 2'-O-methylcytidine-3'-phosphate
  modified_base 21: mod_base = OTHER; note = 2'-O-methyladenosine-3'-phosphate attached to N-[tris(N-acetylgalactosamine-alkyl)-amidodecanoyl)]-4-hydr oxyprolinol Hyp-(N-acetylgalactosamine-alkyl)3
catgctaaatcagtacttcca

SEQ ID NO: 2921 - RNA, 23 nt, synthetic construct
  misc_feature 1..23: note = Description of Artificial Sequence: Synthetic oligonucleotide
  source 1..23: mol_type = other RNA
  modified_base 1: mod_base = OTHER; note = 2'-O-methyluridine-3'-phosphorothioate
  modified_base 2: mod_base = OTHER; note = 2'-fluoroguanosine-3'-phosphorothioate
  modified_base 3: mod_base = OTHER; note = 2'-O-methylguanosine-3'-phosphate
  modified_base 4: mod_base = OTHER; note = 2'-O-methyladenosine-3'-phosphate
  modified_base 5: mod_base = OTHER; note = 2'-O-methyladenosine-3'-phosphate
  modified_base 6: mod_base = OTHER; note = 2'-fluoroguanosine-3'-phosphate
  modified_base 7: mod_base = OTHER; note = 2'-O-methyluridine-3'-phosphate
  modified_base 8: mod_base = OTHER; note = 2'-fluoroadenosine-3'-phosphate
  modified_base 9: mod_base = OTHER; note = 2'-fluorocytidine-3'-phosphate
  modified_base 10: mod_base = OTHER; note = 2'-O-methyluridine-3'-phosphate
  modified_base 11: mod_base = OTHER; note = 2'-O-methylguanosine-3'-phosphate
  modified_base 12: mod_base = OTHER; note = 2'-O-methyladenosine-3'-phosphate
  modified_base 13: mod_base = OTHER; note = 2'-O-methyluridine-3'-phosphate
  modified_base 14: mod_base = OTHER; note = 2'-fluorouridine-3'-phosphate
  modified_base 15: mod_base = OTHER; note = 2'-O-methyluridine-3'-phosphate
  modified_base 16: mod_base = OTHER; note = 2'-fluoroadenosine-3'-phosphate
  modified_base 17: mod_base = OTHER; note = 2'-O-methylguanosine-3'-phosphate
  modified_base 18: mod_base = OTHER; note = 2'-O-methylcytidine-3'-phosphate
  modified_base 19: mod_base = OTHER; note = 2'-O-methyladenosine-3'-phosphate
  modified_base 20: mod_base = OTHER; note = 2'-O-methyluridine-3'-phosphate
  modified_base 21: mod_base = OTHER; note = 2'-O-methylguanosine-3'- phosphorothioate
  modified_base 22: mod_base = OTHER; note = 2'-O-methyluridine-3'-phosphorothioate
  modified_base 23: mod_base = OTHER; note = 2'-O-methyluridine-3'-phosphate
tggaagtactgatttagcatgtt

SEQ ID NO: 2922 - RNA, 21 nt, synthetic construct
  misc_feature 1..21: note = Description of Artificial Sequence: Synthetic oligonucleotide
  source 1..21: mol_type = other RNA
  modified_base 1: mod_base = OTHER; note = 2'-O-methyluridine-3'-phosphorothioate
  modified_base 2: mod_base = OTHER; note = 2'-O-methylcytidine-3'- phosphorothioate
  modified_base 3: mod_base = OTHER; note = 2'-O-methylcytidine-3'-phosphate
  modified_base 4: mod_base = OTHER; note = 2'-O-methyluridine-3'-phosphate
  modified_base 5: mod_base = OTHER; note = 2'-O-methylcytidine-3'-phosphate
  modified_base 6: mod_base = OTHER; note = 2'-O-methyladenosine-3'-phosphate
  modified_base 7: mod_base = OTHER; note = 2'-fluoroadenosine-3'-phosphate
  modified_base 8: mod_base = OTHER; note = 2'-O-methyluridine-3'-phosphate
  modified_base 9: mod_base = OTHER; note = 2'-fluorouridine-3'-phosphate
  modified_base 10: mod_base = OTHER; note = 2'-fluoroguanosine-3'-phosphate
  modified_base 11: mod_base = OTHER; note = 2'-fluoroadenosine-3'-phosphate
  modified_base 12: mod_base = OTHER; note = 2'-O-methyladenosine-3'-phosphate
  modified_base 13: mod_base = OTHER; note = 2'-O-methylguanosine-3'-phosphate
  modified_base 14: mod_base = OTHER; note = 2'-O-methyladenosine-3'-phosphate
  modified_base 15: mod_base = OTHER; note = 2'-O-methyladenosine-3'-phosphate
  modified_base 16: mod_base = OTHER; note = 2'-O-methylguanosine-3'-phosphate
  modified_base 17: mod_base = OTHER; note = 2'-O-methyluridine-3'-phosphate
  modified_base 18: mod_base = OTHER; note = 2'-O-methylguanosine-3'-phosphate
  modified_base 19: mod_base = OTHER; note = 2'-O-methylguanosine-3'-phosphate
  modified_base 20: mod_base = OTHER; note = 2'-O-methylcytidine-3'-phosphate
  modified_base 21: mod_base = OTHER; note = 2'-O-methylguanosine-3'-phosphate attached to N-[tris(N-acetylgalactosamine-alkyl)-amidodecanoyl)]-4-hydr oxyprolinol Hyp-(N-acetylgalactosamine-alkyl)3
tcctcaattgaagaagtggcg

SEQ ID NO: 2923 - RNA, 23 nt, synthetic construct
  misc_feature 1..23: note = Description of Artificial Sequence: Synthetic oligonucleotide
  source 1..23: mol_type = other RNA
  modified_base 1: mod_base = OTHER; note = 2'-O-methylcytidine-3'- phosphorothioate
  modified_base 2: mod_base = OTHER; note = 2'-fluoroguanosine-3'-phosphorothioate
  modified_base 3: mod_base = OTHER; note = 2'-O-methylcytidine-3'-phosphate
  modified_base 4: mod_base = OTHER; note = 2'-O-methylcytidine-3'-phosphate
  modified_base 5: mod_base = OTHER; note = 2'-O-methyladenosine-3'-phosphate
  modified_base 6: mod_base = OTHER; note = 2'-fluorocytidine-3'-phosphate
  modified_base 7: mod_base = OTHER; note = 2'-O-methyluridine-3'-phosphate
  modified_base 8: mod_base = OTHER; note = 2'-fluorouridine-3'-phosphate
  modified_base 9: mod_base = OTHER; note = 2'-fluorocytidine-3'-phosphate
  modified_base 10: mod_base = OTHER; note = 2'-O-methyluridine-3'-phosphate
  modified_base 11: mod_base = OTHER; note = 2'-O-methyluridine-3'-phosphate
  modified_base 12: mod_base = OTHER; note = 2'-O-methylcytidine-3'-phosphate
  modified_base 13: mod_base = OTHER; note = 2'-O-methyladenosine-3'-phosphate
  modified_base 14: mod_base = OTHER; note = 2'-fluoroadenosine-3'-phosphate
  modified_base 15: mod_base = OTHER; note = 2'-O-methyluridine-3'-phosphate
  modified_base 16: mod_base = OTHER; note = 2'-fluorouridine-3'-phosphate
  modified_base 17: mod_base = OTHER; note = 2'-O-methylguanosine-3'-phosphate
  modified_base 18: mod_base = OTHER; note = 2'-O-methyladenosine-3'-phosphate
  modified_base 19: mod_base = OTHER; note = 2'-O-methylguanosine-3'-phosphate
  modified_base 20: mod_base = OTHER; note = 2'-O-methylguanosine-3'-phosphate
  modified_base 21: mod_base = OTHER; note = 2'-O-methyladenosine-3'- phosphorothioate
  modified_base 22: mod_base = OTHER; note = 2'-O-methylguanosine-3'- phosphorothioate
  modified_base 23: mod_base = OTHER; note = 2'-O-methylguanosine-3'-phosphate
cgccacttcttcaattgaggagg

SEQ ID NO: 2924 - RNA, 21 nt, synthetic construct
  misc_feature 1..21: note = Description of Artificial Sequence: Synthetic oligonucleotide
  source 1..21: mol_type = other RNA
  modified_base 1: mod_base = OTHER; note = 2'-O-methylcytidine-3'- phosphorothioate
  modified_base 2: mod_base = OTHER; note = 2'-O-methylcytidine-3'- phosphorothioate
  modified_base 3: mod_base = OTHER; note = 2'-O-methyluridine-3'-phosphate
  modified_base 4: mod_base = OTHER; note = 2'-O-methylcytidine-3'-phosphate
  modified_base 5: mod_base = OTHER; note = 2'-O-methyladenosine-3'-phosphate
  modified_base 6: mod_base = OTHER; note = 2'-O-methyladenosine-3'-phosphate
  modified_base 7: mod_base = OTHER; note = 2'-fluorouridine-3'-phosphate
  modified_base 8: mod_base = OTHER; note = 2'-O-methyluridine-3'-phosphate
  modified_base 9: mod_base = OTHER; note = 2'-fluoroguanosine-3'-phosphate
  modified_base 10: mod_base = OTHER; note = 2'-fluoroadenosine-3'-phosphate
  modified_base 11: mod_base = OTHER; note = 2'-fluoroadenosine-3'-phosphate
  modified_base 12: mod_base = OTHER; note = 2'-O-methylguanosine-3'-phosphate
  modified_base 13: mod_base = OTHER; note = 2'-O-methyladenosine-3'-phosphate
  modified_base 14: mod_base = OTHER; note = 2'-O-methyladenosine-3'-phosphate
  modified_base 15: mod_base = OTHER; note = 2'-O-methylguanosine-3'-phosphate
  modified_base 16: mod_base = OTHER; note = 2'-O-methyluridine-3'-phosphate
  modified_base 17: mod_base = OTHER; note = 2'-O-methylguanosine-3'-phosphate
  modified_base 18: mod_base = OTHER; note = 2'-O-methylguanosine-3'-phosphate
  modified_base 19: mod_base = OTHER; note = 2'-O-methylcytidine-3'-phosphate
  modified_base 20: mod_base = OTHER; note = 2'-O-methylguanosine-3'-phosphate
  modified_base 21: mod_base = OTHER; note = 2'-O-methylguanosine-3'-phosphate attached to N-[tris(N-acetylgalactosamine-alkyl)-amidodecanoyl)]-4-hydr oxyprolinol Hyp-(N-acetylgalactosamine-alkyl)3
cctcaattgaagaagtggcgg

SEQ ID NO: 2925 - RNA, 23 nt, synthetic construct
  misc_feature 1..23: note = Description of Artificial Sequence: Synthetic oligonucleotide
  source 1..23: mol_type = other RNA
  modified_base 1: mod_base = OTHER; note = 2'-O-methylcytidine-3'- phosphorothioate
  modified_base 2: mod_base = OTHER; note = 2'-fluorocytidine-3'-phosphorothioate
  modified_base 3: mod_base = OTHER; note = 2'-O-methylguanosine-3'-phosphate
  modified_base 4: mod_base = OTHER; note = 2'-O-methylcytidine-3'-phosphate
  modified_base 5: mod_base = OTHER; note = 2'-O-methylcytidine-3'-phosphate
  modified_base 6: mod_base = OTHER; note = 2'-fluoroadenosine-3'-phosphate
  modified_base 7: mod_base = OTHER; note = 2'-O-methylcytidine-3'-phosphate
  modified_base 8: mod_base = OTHER; note = 2'-fluorouridine-3'-phosphate
  modified_base 9: mod_base = OTHER; note = 2'-fluorouridine-3'-phosphate
  modified_base 10: mod_base = OTHER; note = 2'-O-methylcytidine-3'-phosphate
  modified_base 11: mod_base = OTHER; note = 2'-O-methyluridine-3'-phosphate
  modified_base 12: mod_base = OTHER; note = 2'-O-methyluridine-3'-phosphate
  modified_base 13: mod_base = OTHER; note = 2'-O-methylcytidine-3'-phosphate
  modified_base 14: mod_base = OTHER; note = 2'-fluoroadenosine-3'-phosphate
  modified_base 15: mod_base = OTHER; note = 2'-O-methyladenosine-3'-phosphate
  modified_base 16: mod_base = OTHER; note = 2'-fluorouridine-3'-phosphate
  modified_base 17: mod_base = OTHER; note = 2'-O-methyluridine-3'-phosphate
  modified_base 18: mod_base = OTHER; note = 2'-O-methylguanosine-3'-phosphate
  modified_base 19: mod_base = OTHER; note = 2'-O-methyladenosine-3'-phosphate
  modified_base 20: mod_base = OTHER; note = 2'-O-methylguanosine-3'-phosphate
  modified_base 21: mod_base = OTHER; note = 2'-O-methylguanosine-3'- phosphorothioate
  modified_base 22: mod_base = OTHER; note = 2'-O-methyladenosine-3'- phosphorothioate
  modified_base 23: mod_base = OTHER; note = 2'-O-methylguanosine-3'-phosphate
ccgccacttcttcaattgaggag

SEQ ID NO: 2926 - RNA, 21 nt, synthetic construct
  misc_feature 1..21: note = Description of Artificial Sequence: Synthetic oligonucleotide
  source 1..21: mol_type = other RNA
  modified_base 1: mod_base = OTHER; note = 2'-O-methylcytidine-3'- phosphorothioate
  modified_base 2: mod_base = OTHER; note = 2'-O-methyladenosine-3'- phosphorothioate
  modified_base 3: mod_base = OTHER; note = 2'-O-methylcytidine-3'-phosphate
  modified_base 4: mod_base = OTHER; note = 2'-O-methylcytidine-3'-phosphate
  modified_base 5: mod_base = OTHER; note = 2'-O-methyluridine-3'-phosphate
  modified_base 6: mod_base = OTHER; note = 2'-O-methylcytidine-3'-phosphate
  modified_base 7: mod_base = OTHER; note = 2'-fluorocytidine-3'-phosphate
  modified_base 8: mod_base = OTHER; note = 2'-O-methyluridine-3'-phosphate
  modified_base 9: mod_base = OTHER; note = 2'-fluorocytidine-3'-phosphate
  modified_base 10: mod_base = OTHER; note = 2'-fluoroadenosine-3'-phosphate
  modified_base 11: mod_base = OTHER; note = 2'-fluoroadenosine-3'-phosphate
  modified_base 12: mod_base = OTHER; note = 2'-O-methyluridine-3'-phosphate
  modified_base 13: mod_base = OTHER; note = 2'-O-methyluridine-3'-phosphate
  modified_base 14: mod_base = OTHER; note = 2'-O-methylguanosine-3'-phosphate
  modified_base 15: mod_base = OTHER; note = 2'-O-methyladenosine-3'-phosphate
  modified_base 16: mod_base = OTHER; note = 2'-O-methyladenosine-3'-phosphate
  modified_base 17: mod_base = OTHER; note = 2'-O-methylguanosine-3'-phosphate
  modified_base 18: mod_base = OTHER; note = 2'-O-methyladenosine-3'-phosphate
  modified_base 19: mod_base = OTHER; note = 2'-O-methyladenosine-3'-phosphate
  modified_base 20: mod_base = OTHER; note = 2'-O-methylguanosine-3'-phosphate
  modified_base 21: mod_base = OTHER; note = 2'-O-methyluridine-3'-phosphate attached to N-[tris(N-acetylgalactosamine-alkyl)-amidodecanoyl)]-4-hydr oxyprolinol Hyp-(N-acetylgalactosamine-alkyl)3
cacctcctcaattgaagaagt

SEQ ID NO: 2927 - RNA, 23 nt, synthetic construct
  misc_feature 1..23: note = Description of Artificial Sequence: Synthetic oligonucleotide
  source 1..23: mol_type = other RNA
  modified_base 1: mod_base = OTHER; note = 2'-O-methyladenosine-3'- phosphorothioate
  modified_base 2: mod_base = OTHER; note = 2'-fluorocytidine-3'-phosphorothioate
  modified_base 3: mod_base = OTHER; note = 2'-O-methyluridine-3'-phosphate
  modified_base 4: mod_base = OTHER; note = 2'-O-methyluridine-3'-phosphate
  modified_base 5: mod_base = OTHER; note = 2'-O-methylcytidine-3'-phosphate
  modified_base 6: mod_base = OTHER; note = 2'-fluorouridine-3'-phosphate
  modified_base 7: mod_base = OTHER; note = 2'-O-methyluridine-3'-phosphate
  modified_base 8: mod_base = OTHER; note = 2'-fluorocytidine-3'-phosphate
  modified_base 9: mod_base = OTHER; note = 2'-fluoroadenosine-3'-phosphate
  modified_base 10: mod_base = OTHER; note = 2'-O-methyladenosine-3'-phosphate
  modified_base 11: mod_base = OTHER; note = 2'-O-methyluridine-3'-phosphate
  modified_base 12: mod_base = OTHER; note = 2'-O-methyluridine-3'-phosphate
  modified_base 13: mod_base = OTHER; note = 2'-O-methylguanosine-3'-phosphate
  modified_base 14: mod_base = OTHER; note = 2'-fluoroadenosine-3'-phosphate
  modified_base 15: mod_base = OTHER; note = 2'-O-methylguanosine-3'-phosphate
  modified_base 16: mod_base = OTHER; note = 2'-fluoroguanosine-3'-phosphate
  modified_base 17: mod_base = OTHER; note = 2'-O-methyladenosine-3'-phosphate
  modified_base 18: mod_base = OTHER; note = 2'-O-methylguanosine-3'-phosphate
  modified_base 19: mod_base = OTHER; note = 2'-O-methylguanosine-3'-phosphate
  modified_base 20: mod_base = OTHER; note = 2'-O-methyluridine-3'-phosphate
  modified_base 21: mod_base = OTHER; note = 2'-O-methylguanosine-3'- phosphorothioate
  modified_base 22: mod_base = OTHER; note = 2'-O-methylguanosine-3'- phosphorothioate
  modified_base 23: mod_base = OTHER; note = 2'-O-methylcytidine-3'-phosphate
acttcttcaattgaggaggtggc

SEQ ID NO: 2928 - RNA, 21 nt, synthetic construct
  misc_feature 1..21: note = Description of Artificial Sequence: Synthetic oligonucleotide
  source 1..21: mol_type = other RNA
  modified_base 1: mod_base = OTHER; note = 2'-O-methylcytidine-3'- phosphorothioate
  modified_base 2: mod_base = OTHER; note = 2'-O-methylcytidine-3'- phosphorothioate
  modified_base 3: mod_base = OTHER; note = 2'-O-methyladenosine-3'-phosphate
  modified_base 4: mod_base = OTHER; note = 2'-O-methylcytidine-3'-phosphate
  modified_base 5: mod_base = OTHER; note = 2'-O-methylcytidine-3'-phosphate
  modified_base 6: mod_base = OTHER; note = 2'-O-methyluridine-3'-phosphate
  modified_base 7: mod_base = OTHER; note = 2'-fluorocytidine-3'-phosphate
  modified_base 8: mod_base = OTHER; note = 2'-O-methylcytidine-3'-phosphate
  modified_base 9: mod_base = OTHER; note = 2'-fluorouridine-3'-phosphate
  modified_base 10: mod_base = OTHER; note = 2'-fluorocytidine-3'-phosphate
  modified_base 11: mod_base = OTHER; note = 2'-fluoroadenosine-3'-phosphate
  modified_base 12: mod_base = OTHER; note = 2'-O-methyladenosine-3'-phosphate
  modified_base 13: mod_base = OTHER; note = 2'-O-methyluridine-3'-phosphate
  modified_base 14: mod_base = OTHER; note = 2'-O-methyluridine-3'-phosphate
  modified_base 15: mod_base = OTHER; note = 2'-O-methylguanosine-3'-phosphate
  modified_base 16: mod_base = OTHER; note = 2'-O-methyladenosine-3'-phosphate
  modified_base 17: mod_base = OTHER; note = 2'-O-methyladenosine-3'-phosphate
  modified_base 18: mod_base = OTHER; note = 2'-O-methylguanosine-3'-phosphate
  modified_base 19: mod_base = OTHER; note = 2'-O-methyladenosine-3'-phosphate
  modified_base 20: mod_base = OTHER; note = 2'-O-methyladenosine-3'-phosphate
  modified_base 21: mod_base = OTHER; note = 2'-O-methylguanosine-3'-phosphate attached to N-[tris(N-acetylgalactosamine-alkyl)-amidodecanoyl)]-4-hydr oxyprolinol Hyp-(N-acetylgalactosamine-alkyl)3
ccacctcctcaattgaagaag

SEQ ID NO: 2929 - RNA, 23 nt, synthetic construct
  misc_feature 1..23: note = Description of Artificial Sequence: Synthetic oligonucleotide
  source 1..23: mol_type = other RNA
  modified_base 1: mod_base = OTHER; note = 2'-O-methylcytidine-3'- phosphorothioate
  modified_base 2: mod_base = OTHER; note = 2'-fluorouridine -3'-phosphorothioate
  modified_base 3: mod_base = OTHER; note = 2'-O-methyluridine-3'-phosphate
  modified_base 4: mod_base = OTHER; note = 2'-O-methylcytidine-3'-phosphate
  modified_base 5: mod_base = OTHER; note = 2'-O-methyluridine-3'-phosphate
  modified_base 6: mod_base = OTHER; note = 2'-fluorouridine-3'-phosphate
  modified_base 7: mod_base = OTHER; note = 2'-O-methylcytidine-3'-phosphate
  modified_base 8: mod_base = OTHER; note = 2'-fluoroadenosine-3'-phosphate
  modified_base 9: mod_base = OTHER; note = 2'-fluoroadenosine-3'-phosphate
  modified_base 10: mod_base = OTHER; note = 2'-O-methyluridine-3'-phosphate
  modified_base 11: mod_base = OTHER; note = 2'-O-methyluridine-3'-phosphate
  modified_base 12: mod_base = OTHER; note = 2'-O-methylguanosine-3'-phosphate
  modified_base 13: mod_base = OTHER; note = 2'-O-methyladenosine-3'-phosphate
  modified_base 14: mod_base = OTHER; note = 2'-fluoroguanosine-3'-phosphate
  modified_base 15: mod_base = OTHER; note = 2'-O-methylguanosine-3'-phosphate
  modified_base 16: mod_base = OTHER; note = 2'-fluoroadenosine-3'-phosphate
  modified_base 17: mod_base = OTHER; note = 2'-O-methylguanosine-3'-phosphate
  modified_base 18: mod_base = OTHER; note = 2'-O-methylguanosine-3'-phosphate
  modified_base 19: mod_base = OTHER; note = 2'-O-methyluridine-3'-phosphate
  modified_base 20: mod_base = OTHER; note = 2'-O-methylguanosine-3'-phosphate
  modified_base 21: mod_base = OTHER; note = 2'-O-methylguanosine-3'- phosphorothioate
  modified_base 22: mod_base = OTHER; note = 2'-O-methylcytidine-3'- phosphorothioate
  modified_base 23: mod_base = OTHER; note = 2'-O-methylcytidine-3'-phosphate
cttcttcaattgaggaggtggcc

SEQ ID NO: 2930 - RNA, 21 nt, synthetic construct
  misc_feature 1..21: note = Description of Artificial Sequence: Synthetic oligonucleotide
  source 1..21: mol_type = other RNA
  modified_base 1: mod_base = OTHER; note = 2'-O-methylcytidine-3'- phosphorothioate
  modified_base 2: mod_base = OTHER; note = 2'-O-methyladenosine-3'- phosphorothioate
  modified_base 3: mod_base = OTHER; note = 2'-O-methyladenosine-3'-phosphate
  modified_base 4: mod_base = OTHER; note = 2'-O-methylguanosine-3'-phosphate
  modified_base 5: mod_base = OTHER; note = 2'-O-methyladenosine-3'-phosphate
  modified_base 6: mod_base = OTHER; note = 2'-O-methyluridine-3'-phosphate
  modified_base 7: mod_base = OTHER; note = 2'-fluoroguanosine-3'-phosphate
  modified_base 8: mod_base = OTHER; note = 2'-O-methyluridine-3'-phosphate
  modified_base 9: mod_base = OTHER; note = 2'-fluorocytidine-3'-phosphate
  modified_base 10: mod_base = OTHER; note = 2'-fluorocytidine-3'-phosphate
  modified_base 11: mod_base = OTHER; note = 2'-fluorouridine-3'-phosphate
  modified_base 12: mod_base = OTHER; note = 2'-O-methylcytidine-3'-phosphate
  modified_base 13: mod_base = OTHER; note = 2'-O-methylguanosine-3'-phosphate
  modified_base 14: mod_base = OTHER; note = 2'-O-methyladenosine-3'-phosphate
  modified_base 15: mod_base = OTHER; note = 2'-O-methylguanosine-3'-phosphate
  modified_base 16: mod_base = OTHER; note = 2'-O-methyladenosine-3'-phosphate
  modified_base 17: mod_base = OTHER; note = 2'-O-methyluridine-3'-phosphate
  modified_base 18: mod_base = OTHER; note = 2'-O-methyladenosine-3'-phosphate
  modified_base 19: mod_base = OTHER; note = 2'-O-methylcytidine-3'-phosphate
  modified_base 20: mod_base = OTHER; note = 2'-O-methyluridine-3'-phosphate
  modified_base 21: mod_base = OTHER; note = 2'-O-methyladenosine-3'-phosphate attached to N-[tris(N-acetylgalactosamine-alkyl)-amidodecanoyl)]-4-hydr oxyprolinol Hyp-(N-acetylgalactosamine-alkyl)3
caagatgtcctcgagatacta

SEQ ID NO: 2931 - RNA, 23 nt, synthetic construct
  misc_feature 1..23: note = Description of Artificial Sequence: Synthetic oligonucleotide
  source 1..23: mol_type = other RNA
  modified_base 1: mod_base = OTHER; note = 2'-O-methyluridine-3'-phosphorothioate
  modified_base 2: mod_base = OTHER; note = 2'-fluoroadenosine-3'-phosphorothioate
  modified_base 3: mod_base = OTHER; note = 2'-O-methylguanosine-3'-phosphate
  modified_base 4: mod_base = OTHER; note = 2'-O-methyluridine-3'-phosphate
  modified_base 5: mod_base = OTHER; note = 2'-O-methyladenosine-3'-phosphate
  modified_base 6: mod_base = OTHER; note = 2'-fluorouridine-3'-phosphate
  modified_base 7: mod_base = OTHER; note = 2'-O-methylcytidine-3'-phosphate
  modified_base 8: mod_base = OTHER; note = 2'-fluorouridine-3'-phosphate
  modified_base 9: mod_base = OTHER; note = 2'-fluorocytidine-3'-phosphate
  modified_base 10: mod_base = OTHER; note = 2'-O-methylguanosine-3'-phosphate
  modified_base 11: mod_base = OTHER; note = 2'-O-methyladenosine-3'-phosphate
  modified_base 12: mod_base = OTHER; note = 2'-O-methylguanosine-3'-phosphate
  modified_base 13: mod_base = OTHER; note = 2'-O-methylguanosine-3'-phosphate
  modified_base 14: mod_base = OTHER; note = 2'-fluoroadenosine-3'-phosphate
  modified_base 15: mod_base = OTHER; note = 2'-O-methylcytidine-3'-phosphate
  modified_base 16: mod_base = OTHER; note = 2'-fluoroadenosine-3'-phosphate
  modified_base 17: mod_base = OTHER; note = 2'-O-methyluridine-3'-phosphate
  modified_base 18: mod_base = OTHER; note = 2'-O-methylcytidine-3'-phosphate
  modified_base 19: mod_base = OTHER; note = 2'-O-methyluridine-3'-phosphate
  modified_base 20: mod_base = OTHER; note = 2'-O-methyluridine-3'-phosphate
  modified_base 21: mod_base = OTHER; note = 2'-O-methylguanosine-3'- phosphorothioate
  modified_base 22: mod_base = OTHER; note = 2'-O-methyladenosine-3'- phosphorothioate
  modified_base 23: mod_base = OTHER; note = 2'-O-methyladenosine-3'-phosphate
tagtatctcgaggacatcttgaa

SEQ ID NO: 2932 - RNA, 21 nt, synthetic construct
  misc_feature 1..21: note = Description of Artificial Sequence: Synthetic oligonucleotide
  source 1..21: mol_type = other RNA
  modified_base 1: mod_base = OTHER; note = 2'-O-methyladenosine-3'- phosphorothioate
  modified_base 2: mod_base = OTHER; note = 2'-O-methyladenosine-3'- phosphorothioate
  modified_base 3: mod_base = OTHER; note = 2'-O-methylguanosine-3'-phosphate
  modified_base 4: mod_base = OTHER; note = 2'-O-methyladenosine-3'-phosphate
  modified_base 5: mod_base = OTHER; note = 2'-O-methyluridine-3'-phosphate
  modified_base 6: mod_base = OTHER; note = 2'-O-methylguanosine-3'-phosphate
  modified_base 7: mod_base = OTHER; note = 2'-fluorouridine-3'-phosphate
  modified_base 8: mod_base = OTHER; note = 2'-O-methylcytidine-3'-phosphate
  modified_base 9: mod_base = OTHER; note = 2'-fluorocytidine-3'-phosphate
  modified_base 10: mod_base = OTHER; note = 2'-fluorouridine-3'-phosphate
  modified_base 11: mod_base = OTHER; note = 2'-fluorocytidine-3'-phosphate
  modified_base 12: mod_base = OTHER; note = 2'-O-methylguanosine-3'-phosphate
  modified_base 13: mod_base = OTHER; note = 2'-O-methyladenosine-3'-phosphate
  modified_base 14: mod_base = OTHER; note = 2'-O-methylguanosine-3'-phosphate
  modified_base 15: mod_base = OTHER; note = 2'-O-methyladenosine-3'-phosphate
  modified_base 16: mod_base = OTHER; note = 2'-O-methyluridine-3'-phosphate
  modified_base 17: mod_base = OTHER; note = 2'-O-methyladenosine-3'-phosphate
  modified_base 18: mod_base = OTHER; note = 2'-O-methylcytidine-3'-phosphate
  modified_base 19: mod_base = OTHER; note = 2'-O-methyluridine-3'-phosphate
  modified_base 20: mod_base = OTHER; note = 2'-O-methyladenosine-3'-phosphate
  modified_base 21: mod_base = OTHER; note = 2'-O-methyladenosine-3'-phosphate attached to N-[tris(N-acetylgalactosamine-alkyl)-amidodecanoyl)]-4-hydr oxyprolinol Hyp-(N-acetylgalactosamine-alkyl)3
aagatgtcctcgagatactaa

SEQ ID NO: 2933 - RNA, 23 nt, synthetic construct
  misc_feature 1..23: note = Description of Artificial Sequence: Synthetic oligonucleotide
  source 1..23: mol_type = other RNA
  modified_base 1: mod_base = OTHER; note = 2'-O-methyluridine-3'-phosphorothioate
  modified_base 2: mod_base = OTHER; note = 2'-fluorouridine -3'-phosphorothioate
  modified_base 3: mod_base = OTHER; note = 2'-O-methyladenosine-3'-phosphate
  modified_base 4: mod_base = OTHER; note = 2'-O-methylguanosine-3'-phosphate
  modified_base 5: mod_base = OTHER; note = 2'-O-methyluridine-3'-phosphate
  modified_base 6: mod_base = OTHER; note = 2'-fluoroadenosine-3'-phosphate
  modified_base 7: mod_base = OTHER; note = 2'-O-methyluridine-3'-phosphate
  modified_base 8: mod_base = OTHER; note = 2'-fluorocytidine-3'-phosphate
  modified_base 9: mod_base = OTHER; note = 2'-fluorouridine-3'-phosphate
  modified_base 10: mod_base = OTHER; note = 2'-O-methylcytidine-3'-phosphate
  modified_base 11: mod_base = OTHER; note = 2'-O-methylguanosine-3'-phosphate
  modified_base 12: mod_base = OTHER; note = 2'-O-methyladenosine-3'-phosphate
  modified_base 13: mod_base = OTHER; note = 2'-O-methylguanosine-3'-phosphate
  modified_base 14: mod_base = OTHER; note = 2'-fluoroguanosine-3'-phosphate
  modified_base 15: mod_base = OTHER; note = 2'-O-methyladenosine-3'-phosphate
  modified_base 16: mod_base = OTHER; note = 2'-fluorocytidine-3'-phosphate
  modified_base 17: mod_base = OTHER; note = 2'-O-methyladenosine-3'-phosphate
  modified_base 18: mod_base = OTHER; note = 2'-O-methyluridine-3'-phosphate
  modified_base 19: mod_base = OTHER; note = 2'-O-methylcytidine-3'-phosphate
  modified_base 20: mod_base = OTHER; note = 2'-O-methyluridine-3'-phosphate
  modified_base 21: mod_base = OTHER; note = 2'-O-methyluridine-3'-phosphorothioate
  modified_base 22: mod_base = OTHER; note = 2'-O-methylguanosine-3'- phosphorothioate
  modified_base 23: mod_base = OTHER; note = 2'-O-methyladenosine-3'-phosphate
ttagtatctcgaggacatcttga

SEQ ID NO: 2934 - RNA, 21 nt, synthetic construct
  misc_feature 1..21: note = Description of Artificial Sequence: Synthetic oligonucleotide
  source 1..21: mol_type = other RNA
  modified_base 1: mod_base = OTHER; note = 2'-O-methyluridine-3'-phosphorothioate
  modified_base 2: mod_base = OTHER; note = 2'-O-methylguanosine-3'- phosphorothioate
  modified_base 3: mod_base = OTHER; note = 2'-O-methyluridine-3'-phosphate
  modified_base 4: mod_base = OTHER; note = 2'-O-methyluridine-3'-phosphate
  modified_base 5: mod_base = OTHER; note = 2'-O-methylcytidine-3'-phosphate
  modified_base 6: mod_base = OTHER; note = 2'-O-methyladenosine-3'-phosphate
  modified_base 7: mod_base = OTHER; note = 2'-fluoroadenosine-3'-phosphate
  modified_base 8: mod_base = OTHER; note = 2'-O-methylguanosine-3'-phosphate
  modified_base 9: mod_base = OTHER; note = 2'-fluoroadenosine-3'-phosphate
  modified_base 10: mod_base = OTHER; note = 2'-fluorouridine-3'-phosphate
  modified_base 11: mod_base = OTHER; note = 2'-fluoroguanosine-3'-phosphate
  modified_base 12: mod_base = OTHER; note = 2'-O-methyluridine-3'-phosphate
  modified_base 13: mod_base = OTHER; note = 2'-O-methylcytidine-3'-phosphate
  modified_base 14: mod_base = OTHER; note = 2'-O-methylcytidine-3'-phosphate
  modified_base 15: mod_base = OTHER; note = 2'-O-methyluridine-3'-phosphate
  modified_base 16: mod_base = OTHER; note = 2'-O-methylcytidine-3'-phosphate
  modified_base 17: mod_base = OTHER; note = 2'-O-methylguanosine-3'-phosphate
  modified_base 18: mod_base = OTHER; note = 2'-O-methyladenosine-3'-phosphate
  modified_base 19: mod_base = OTHER; note = 2'-O-methylguanosine-3'-phosphate
  modified_base 20: mod_base = OTHER; note = 2'-O-methyladenosine-3'-phosphate
  modified_base 21: mod_base = OTHER; note = 2'-O-methyluridine-3'-phosphate attached to N-[tris(N-acetylgalactosamine-alkyl)-amidodecanoyl)]-4-hydr oxyprolinol Hyp-(N-acetylgalactosamine-alkyl)3
tgttcaagatgtcctcgagat

SEQ ID NO: 2935 - RNA, 23 nt, synthetic construct
  misc_feature 1..23: note = Description of Artificial Sequence: Synthetic oligonucleotide
  source 1..23: mol_type = other RNA
  modified_base 1: mod_base = OTHER; note = 2'-O-methyladenosine-3'- phosphorothioate
  modified_base 2: mod_base = OTHER; note = 2'-fluorouridine -3'-phosphorothioate
  modified_base 3: mod_base = OTHER; note = 2'-O-methylcytidine-3'-phosphate
  modified_base 4: mod_base = OTHER; note = 2'-O-methyluridine-3'-phosphate
  modified_base 5: mod_base = OTHER; note = 2'-O-methylcytidine-3'-phosphate
  modified_base 6: mod_base = OTHER; note = 2'-fluoroguanosine-3'-phosphate
  modified_base 7: mod_base = OTHER; note = 2'-O-methyladenosine-3'-phosphate
  modified_base 8: mod_base = OTHER; note = 2'-fluoroguanosine-3'-phosphate
  modified_base 9: mod_base = OTHER; note = 2'-fluoroguanosine-3'-phosphate
  modified_base 10: mod_base = OTHER; note = 2'-O-methyladenosine-3'-phosphate
  modified_base 11: mod_base = OTHER; note = 2'-O-methylcytidine-3'-phosphate
  modified_base 12: mod_base = OTHER; note = 2'-O-methyladenosine-3'-phosphate
  modified_base 13: mod_base = OTHER; note = 2'-O-methyluridine-3'-phosphate
  modified_base 14: mod_base = OTHER; note = 2'-fluorocytidine-3'-phosphate
  modified_base 15: mod_base = OTHER; note = 2'-O-methyluridine-3'-phosphate
  modified_base 16: mod_base = OTHER; note = 2'-fluorouridine-3'-phosphate
  modified_base 17: mod_base = OTHER; note = 2'-O-methylguanosine-3'-phosphate
  modified_base 18: mod_base = OTHER; note = 2'-O-methyladenosine-3'-phosphate
  modified_base 19: mod_base = OTHER; note = 2'-O-methyladenosine-3'-phosphate
  modified_base 20: mod_base = OTHER; note = 2'-O-methylcytidine-3'-phosphate
  modified_base 21: mod_base = OTHER; note = 2'-O-methyladenosine-3'- phosphorothioate
  modified_base 22: mod_base = OTHER; note = 2'-O-methylcytidine-3'- phosphorothioate
  modified_base 23: mod_base = OTHER; note = 2'-O-methylcytidine-3'-phosphate
atctcgaggacatcttgaacacc

SEQ ID NO: 2936 - RNA, 21 nt, synthetic construct
  misc_feature 1..21: note = Description of Artificial Sequence: Synthetic oligonucleotide
  source 1..21: mol_type = other RNA
  modified_base 1: mod_base = OTHER; note = 2'-O-methylguanosine-3'- phosphorothioate
  modified_base 2: mod_base = OTHER; note = 2'-O-methyluridine-3'-phosphorothioate
  modified_base 3: mod_base = OTHER; note = 2'-O-methylguanosine-3'-phosphate
  modified_base 4: mod_base = OTHER; note = 2'-O-methyluridine-3'-phosphate
  modified_base 5: mod_base = OTHER; note = 2'-O-methyluridine-3'-phosphate
  modified_base 6: mod_base = OTHER; note = 2'-O-methylcytidine-3'-phosphate
  modified_base 7: mod_base = OTHER; note = 2'-fluoroadenosine-3'-phosphate
  modified_base 8: mod_base = OTHER; note = 2'-O-methyladenosine-3'-phosphate
  modified_base 9: mod_base = OTHER; note = 2'-fluoroguanosine-3'-phosphate
  modified_base 10: mod_base = OTHER; note = 2'-fluoroadenosine-3'-phosphate
  modified_base 11: mod_base = OTHER; note = 2'-fluorouridine-3'-phosphate
  modified_base 12: mod_base = OTHER; note = 2'-O-methylguanosine-3'-phosphate
  modified_base 13: mod_base = OTHER; note = 2'-O-methyluridine-3'-phosphate
  modified_base 14: mod_base = OTHER; note = 2'-O-methylcytidine-3'-phosphate
  modified_base 15: mod_base = OTHER; note = 2'-O-methylcytidine-3'-phosphate
  modified_base 16: mod_base = OTHER; note = 2'-O-methyluridine-3'-phosphate
  modified_base 17: mod_base = OTHER; note = 2'-O-methylcytidine-3'-phosphate
  modified_base 18: mod_base = OTHER; note = 2'-O-methylguanosine-3'-phosphate
  modified_base 19: mod_base = OTHER; note = 2'-O-methyladenosine-3'-phosphate
  modified_base 20: mod_base = OTHER; note = 2'-O-methylguanosine-3'-phosphate
  modified_base 21: mod_base = OTHER; note = 2'-O-methyladenosine-3'-phosphate attached to N-[tris(N-acetylgalactosamine-alkyl)-amidodecanoyl)]-4-hydr oxyprolinol Hyp-(N-acetylgalactosamine-alkyl)3
gtgttcaagatgtcctcgaga

SEQ ID NO: 2937 - RNA, 23 nt, synthetic construct
  misc_feature 1..23: note = Description of Artificial Sequence: Synthetic oligonucleotide
  source 1..23: mol_type = other RNA
  modified_base 1: mod_base = OTHER; note = 2'-O-methyluridine-3'-phosphorothioate
  modified_base 2: mod_base = OTHER; note = 2'-fluorocytidine-3'-phosphorothioate
  modified_base 3: mod_base = OTHER; note = 2'-O-methyluridine-3'-phosphate
  modified_base 4: mod_base = OTHER; note = 2'-O-methylcytidine-3'-phosphate
  modified_base 5: mod_base = OTHER; note = 2'-O-methylguanosine-3'-phosphate
  modified_base 6: mod_base = OTHER; note = 2'-fluoroadenosine-3'-phosphate
  modified_base 7: mod_base = OTHER; note = 2'-O-methylguanosine-3'-phosphate
  modified_base 8: mod_base = OTHER; note = 2'-fluoroguanosine-3'-phosphate
  modified_base 9: mod_base = OTHER; note = 2'-fluoroadenosine-3'-phosphate
  modified_base 10: mod_base = OTHER; note = 2'-O-methylcytidine-3'-phosphate
  modified_base 11: mod_base = OTHER; note = 2'-O-methyladenosine-3'-phosphate
  modified_base 12: mod_base = OTHER; note = 2'-O-methyluridine-3'-phosphate
  modified_base 13: mod_base = OTHER; note = 2'-O-methylcytidine-3'-phosphate
  modified_base 14: mod_base = OTHER; note = 2'-fluorouridine-3'-phosphate
  modified_base 15: mod_base = OTHER; note = 2'-O-methyluridine-3'-phosphate
  modified_base 16: mod_base = OTHER; note = 2'-fluoroguanosine-3'-phosphate
  modified_base 17: mod_base = OTHER; note = 2'-O-methyladenosine-3'-phosphate
  modified_base 18: mod_base = OTHER; note = 2'-O-methyladenosine-3'-phosphate
  modified_base 19: mod_base = OTHER; note = 2'-O-methylcytidine-3'-phosphate
  modified_base 20: mod_base = OTHER; note = 2'-O-methyladenosine-3'-phosphate
  modified_base 21: mod_base = OTHER; note = 2'-O-methylcytidine-3'- phosphorothioate
  modified_base 22: mod_base = OTHER; note = 2'-O-methylcytidine-3'- phosphorothioate
  modified_base 23: mod_base = OTHER; note = 2'-O-methyluridine-3'-phosphate
tctcgaggacatcttgaacacct

SEQ ID NO: 2938 - RNA, 21 nt, synthetic construct
  misc_feature 1..21: note = Description of Artificial Sequence: Synthetic oligonucleotide
  source 1..21: mol_type = other RNA
  modified_base 1: mod_base = OTHER; note = 2'-O-methyladenosine-3'- phosphorothioate
  modified_base 2: mod_base = OTHER; note = 2'-O-methylcytidine-3'- phosphorothioate
  modified_base 3: mod_base = OTHER; note = 2'-O-methyladenosine-3'-phosphate
  modified_base 4: mod_base = OTHER; note = 2'-O-methyluridine-3'-phosphate
  modified_base 5: mod_base = OTHER; note = 2'-O-methylguanosine-3'-phosphate
  modified_base 6: mod_base = OTHER; note = 2'-O-methylcytidine-3'-phosphate
  modified_base 7: mod_base = OTHER; note = 2'-fluorouridine-3'-phosphate
  modified_base 8: mod_base = OTHER; note = 2'-O-methyladenosine-3'-phosphate
  modified_base 9: mod_base = OTHER; note = 2'-fluoroadenosine-3'-phosphate
  modified_base 10: mod_base = OTHER; note = 2'-fluoroadenosine-3'-phosphate
  modified_base 11: mod_base = OTHER; note = 2'-fluorouridine-3'-phosphate
  modified_base 12: mod_base = OTHER; note = 2'-O-methylcytidine-3'-phosphate
  modified_base 13: mod_base = OTHER; note = 2'-O-methyladenosine-3'-phosphate
  modified_base 14: mod_base = OTHER; note = 2'-O-methylguanosine-3'-phosphate
  modified_base 15: mod_base = OTHER; note = 2'-O-methyluridine-3'-phosphate
  modified_base 16: mod_base = OTHER; note = 2'-O-methyladenosine-3'-phosphate
  modified_base 17: mod_base = OTHER; note = 2'-O-methylcytidine-3'-phosphate
  modified_base 18: mod_base = OTHER; note = 2'-O-methyluridine-3'-phosphate
  modified_base 19: mod_base = OTHER; note = 2'-O-methyluridine-3'-phosphate
  modified_base 20: mod_base = OTHER; note = 2'-O-methylcytidine-3'-phosphate
  modified_base 21: mod_base = OTHER; note = 2'-O-methylcytidine-3'-phosphate attached to N-[tris(N-acetylgalactosamine-alkyl)-amidodecanoyl)]-4-hydr oxyprolinol Hyp-(N-acetylgalactosamine-alkyl)3
acatgctaaatcagtacttcc

SEQ ID NO: 2939 - RNA, 23 nt, synthetic construct
  misc_feature 1..23: note = Description of Artificial Sequence: Synthetic oligonucleotide
  source 1..23: mol_type = other RNA
  modified_base 1: mod_base = OTHER; note = 2'-O-methylguanosine-3'- phosphorothioate
  modified_base 2: mod_base = OTHER; note = 2'-fluoroguanosine-3'-phosphorothioate
  modified_base 3: mod_base = OTHER; note = 2'-O-methyladenosine-3'-phosphate
  modified_base 4: mod_base = OTHER; note = 2'-O-methyladenosine-3'-phosphate
  modified_base 5: mod_base = OTHER; note = 2'-O-methylguanosine-3'-phosphate
  modified_base 6: mod_base = OTHER; note = 2'-fluorouridine-3'-phosphate
  modified_base 7: mod_base = OTHER; note = 2'-O-methyladenosine-3'-phosphate
  modified_base 8: mod_base = OTHER; note = 2'-fluorocytidine-3'-phosphate
  modified_base 9: mod_base = OTHER; note = 2'-fluorouridine-3'-phosphate
  modified_base 10: mod_base = OTHER; note = 2'-O-methylguanosine-3'-phosphate
  modified_base 11: mod_base = OTHER; note = 2'-O-methyladenosine-3'-phosphate
  modified_base 12: mod_base = OTHER; note = 2'-O-methyluridine-3'-phosphate
  modified_base 13: mod_base = OTHER; note = 2'-O-methyluridine-3'-phosphate
  modified_base 14: mod_base = OTHER; note = 2'-fluorouridine-3'-phosphate
  modified_base 15: mod_base = OTHER; note = 2'-O-methyladenosine-3'-phosphate
  modified_base 16: mod_base = OTHER; note = 2'-fluoroguanosine-3'-phosphate
  modified_base 17: mod_base = OTHER; note = 2'-O-methylcytidine-3'-phosphate
  modified_base 18: mod_base = OTHER; note = 2'-O-methyladenosine-3'-phosphate
  modified_base 19: mod_base = OTHER; note = 2'-O-methyluridine-3'-phosphate
  modified_base 20: mod_base = OTHER; note = 2'-O-methylguanosine-3'-phosphate
  modified_base 21: mod_base = OTHER; note = 2'-O-methyluridine-3'-phosphorothioate
  modified_base 22: mod_base = OTHER; note = 2'-O-methyluridine-3'-phosphorothioate
  modified_base 23: mod_base = OTHER; note = 2'-O-methylguanosine-3'-phosphate
ggaagtactgatttagcatgttg

SEQ ID NO: 2940 - RNA, 21 nt, synthetic construct
  misc_feature 1..21: note = Description of Artificial Sequence: Synthetic oligonucleotide
  source 1..21: mol_type = other RNA
  modified_base 1: mod_base = OTHER; note = 2'-O-methylcytidine-3'- phosphorothioate
  modified_base 2: mod_base = OTHER; note = 2'-O-methyladenosine-3'- phosphorothioate
  modified_base 3: mod_base = OTHER; note = 2'-O-methyluridine-3'-phosphate
  modified_base 4: mod_base = OTHER; note = 2'-O-methylguanosine-3'-phosphate
  modified_base 5: mod_base = OTHER; note = 2'-O-methylcytidine-3'-phosphate
  modified_base 6: mod_base = OTHER; note = 2'-O-methyluridine-3'-phosphate
  modified_base 7: mod_base = OTHER; note = 2'-fluoroadenosine-3'-phosphate
  modified_base 8: mod_base = OTHER; note = 2'-O-methyladenosine-3'-phosphate
  modified_base 9: mod_base = OTHER; note = 2'-fluoroadenosine-3'-phosphate
  modified_base 10: mod_base = OTHER; note = 2'-fluorouridine-3'-phosphate
  modified_base 11: mod_base = OTHER; note = 2'-fluorocytidine-3'-phosphate
  modified_base 12: mod_base = OTHER; note = 2'-O-methyladenosine-3'-phosphate
  modified_base 13: mod_base = OTHER; note = 2'-O-methylguanosine-3'-phosphate
  modified_base 14: mod_base = OTHER; note = 2'-O-methyluridine-3'-phosphate
  modified_base 15: mod_base = OTHER; note = 2'-O-methyladenosine-3'-phosphate
  modified_base 16: mod_base = OTHER; note = 2'-O-methylcytidine-3'-phosphate
  modified_base 17: mod_base = OTHER; note = 2'-O-methyluridine-3'-phosphate
  modified_base 18: mod_base = OTHER; note = 2'-O-methyluridine-3'-phosphate
  modified_base 19: mod_base = OTHER; note = 2'-O-methylcytidine-3'-phosphate
  modified_base 20: mod_base = OTHER; note = 2'-O-methylcytidine-3'-phosphate
  modified_base 21: mod_base = OTHER; note = 2'-O-methyladenosine-3'-phosphate attached to N-[tris(N-acetylgalactosamine-alkyl)-amidodecanoyl)]-4-hydr oxyprolinol Hyp-(N-acetylgalactosamine-alkyl)3
catgctaaatcagtacttcca

SEQ ID NO: 2941 - RNA, 23 nt, synthetic construct
  misc_feature 1..23: note = Description of Artificial Sequence: Synthetic oligonucleotide
  source 1..23: mol_type = other RNA
  modified_base 1: mod_base = OTHER; note = 2'-O-methyluridine-3'-phosphorothioate
  modified_base 2: mod_base = OTHER; note = 2'-fluoroguanosine-3'-phosphorothioate
  modified_base 3: mod_base = OTHER; note = 2'-O-methylguanosine-3'-phosphate
  modified_base 4: mod_base = OTHER; note = 2'-O-methyladenosine-3'-phosphate
  modified_base 5: mod_base = OTHER; note = 2'-O-methyladenosine-3'-phosphate
  modified_base 6: mod_base = OTHER; note = 2'-fluoroguanosine-3'-phosphate
  modified_base 7: mod_base = OTHER; note = 2'-O-methyluridine-3'-phosphate
  modified_base 8: mod_base = OTHER; note = 2'-fluoroadenosine-3'-phosphate
  modified_base 9: mod_base = OTHER; note = 2'-fluorocytidine-3'-phosphate
  modified_base 10: mod_base = OTHER; note = 2'-O-methyluridine-3'-phosphate
  modified_base 11: mod_base = OTHER; note = 2'-O-methylguanosine-3'-phosphate
  modified_base 12: mod_base = OTHER; note = 2'-O-methyladenosine-3'-phosphate
  modified_base 13: mod_base = OTHER; note = 2'-O-methyluridine-3'-phosphate
  modified_base 14: mod_base = OTHER; note = 2'-fluorouridine-3'-phosphate
  modified_base 15: mod_base = OTHER; note = 2'-O-methyluridine-3'-phosphate
  modified_base 16: mod_base = OTHER; note = 2'-fluoroadenosine-3'-phosphate
  modified_base 17: mod_base = OTHER; note = 2'-O-methylguanosine-3'-phosphate
  modified_base 18: mod_base = OTHER; note = 2'-O-methylcytidine-3'-phosphate
  modified_base 19: mod_base = OTHER; note = 2'-O-methyladenosine-3'-phosphate
  modified_base 20: mod_base = OTHER; note = 2'-O-methyluridine-3'-phosphate
  modified_base 21: mod_base = OTHER; note = 2'-O-methylguanosine-3'- phosphorothioate
  modified_base 22: mod_base = OTHER; note = 2'-O-methyluridine-3'-phosphorothioate
  modified_base 23: mod_base = OTHER; note = 2'-O-methyluridine-3'-phosphate
tggaagtactgatttagcatgtt

SEQ ID NO: 2942 - RNA, 21 nt, synthetic construct
  misc_feature 1..21: note = Description of Artificial Sequence: Synthetic oligonucleotide
  source 1..21: mol_type = other RNA
  modified_base 1: mod_base = OTHER; note = 2'-O-methyladenosine-3'- phosphorothioate
  modified_base 2: mod_base = OTHER; note = 2'-O-methyladenosine-3'- phosphorothioate
  modified_base 3: mod_base = OTHER; note = 2'-O-methylcytidine-3'-phosphate
  modified_base 4: mod_base = OTHER; note = 2'-O-methyladenosine-3'-phosphate
  modified_base 5: mod_base = OTHER; note = 2'-O-methyladenosine-3'-phosphate
  modified_base 6: mod_base = OTHER; note = 2'-O-methylcytidine-3'-phosphate
  modified_base 7: mod_base = OTHER; note = 2'-fluoroadenosine-3'-phosphate
  modified_base 8: mod_base = OTHER; note = 2'-O-methyluridine-3'-phosphate
  modified_base 9: mod_base = OTHER; note = 2'-fluoroguanosine-3'-phosphate
  modified_base 10: mod_base = OTHER; note = 2'-fluorocytidine-3'-phosphate
  modified_base 11: mod_base = OTHER; note = 2'-fluorouridine-3'-phosphate
  modified_base 12: mod_base = OTHER; note = 2'-O-methyladenosine-3'-phosphate
  modified_base 13: mod_base = OTHER; note = 2'-O-methyladenosine-3'-phosphate
  modified_base 14: mod_base = OTHER; note = 2'-O-methyladenosine-3'-phosphate
  modified_base 15: mod_base = OTHER; note = 2'-O-methyluridine-3'-phosphate
  modified_base 16: mod_base = OTHER; note = 2'-O-methylcytidine-3'-phosphate
  modified_base 17: mod_base = OTHER; note = 2'-O-methyladenosine-3'-phosphate
  modified_base 18: mod_base = OTHER; note = 2'-O-methylguanosine-3'-phosphate
  modified_base 19: mod_base = OTHER; note = 2'-O-methyluridine-3'-phosphate
  modified_base 20: mod_base = OTHER; note = 2'-O-methyladenosine-3'-phosphate
  modified_base 21: mod_base = OTHER; note = 2'-O-methylcytidine-3'-phosphate attached to N-[tris(N-acetylgalactosamine-alkyl)-amidodecanoyl)]-4-hydr oxyprolinol Hyp-(N-acetylgalactosamine-alkyl)3
aacaacatgctaaatcagtac

SEQ ID NO: 2943 - RNA, 23 nt, synthetic construct
  misc_feature 1..23: note = Description of Artificial Sequence: Synthetic oligonucleotide
  source 1..23: mol_type = other RNA
  modified_base 1: mod_base = OTHER; note = 2'-O-methylguanosine-3'- phosphorothioate
  modified_base 2: mod_base = OTHER; note = 2'-fluorouridine -3'-phosphorothioate
  modified_base 3: mod_base = OTHER; note = 2'-O-methyladenosine-3'-phosphate
  modified_base 4: mod_base = OTHER; note = 2'-O-methylcytidine-3'-phosphate
  modified_base 5: mod_base = OTHER; note = 2'-O-methyluridine-3'-phosphate
  modified_base 6: mod_base = OTHER; note = 2'-fluoroguanosine-3'-phosphate
  modified_base 7: mod_base = OTHER; note = 2'-O-methyladenosine-3'-phosphate
  modified_base 8: mod_base = OTHER; note = 2'-fluorouridine-3'-phosphate
  modified_base 9: mod_base = OTHER; note = 2'-fluorouridine-3'-phosphate
  modified_base 10: mod_base = OTHER; note = 2'-O-methyluridine-3'-phosphate
  modified_base 11: mod_base = OTHER; note = 2'-O-methyladenosine-3'-phosphate
  modified_base 12: mod_base = OTHER; note = 2'-O-methylguanosine-3'-phosphate
  modified_base 13: mod_base = OTHER; note = 2'-O-methylcytidine-3'-phosphate
  modified_base 14: mod_base = OTHER; note = 2'-fluoroadenosine-3'-phosphate
  modified_base 15: mod_base = OTHER; note = 2'-O-methyluridine-3'-phosphate
  modified_base 16: mod_base = OTHER; note = 2'-fluoroguanosine-3'-phosphate
  modified_base 17: mod_base = OTHER; note = 2'-O-methyluridine-3'-phosphate
  modified_base 18: mod_base = OTHER; note = 2'-O-methyluridine-3'-phosphate
  modified_base 19: mod_base = OTHER; note = 2'-O-methylguanosine-3'-phosphate
  modified_base 20: mod_base = OTHER; note = 2'-O-methyluridine-3'-phosphate
  modified_base 21: mod_base = OTHER; note = 2'-O-methyluridine-3'-phosphorothioate
  modified_base 22: mod_base = OTHER; note = 2'-O-methylcytidine-3'- phosphorothioate
  modified_base 23: mod_base = OTHER; note = 2'-O-methyladenosine-3'-phosphate
gtactgatttagcatgttgttca

SEQ ID NO: 2944 - RNA, 21 nt, synthetic construct
  misc_feature 1..21: note = Description of Artificial Sequence: Synthetic oligonucleotide
  source 1..21: mol_type = other RNA
  modified_base 1: mod_base = OTHER; note = 2'-O-methylguanosine-3'- phosphorothioate
  modified_base 2: mod_base = OTHER; note = 2'-O-methyladenosine-3'- phosphorothioate
  modified_base 3: mod_base = OTHER; note = 2'-O-methyladenosine-3'-phosphate
  modified_base 4: mod_base = OTHER; note = 2'-O-methylcytidine-3'-phosphate
  modified_base 5: mod_base = OTHER; note = 2'-O-methyladenosine-3'-phosphate
  modified_base 6: mod_base = OTHER; note = 2'-O-methyladenosine-3'-phosphate
  modified_base 7: mod_base = OTHER; note = 2'-fluorocytidine-3'-phosphate
  modified_base 8: mod_base = OTHER; note = 2'-O-methyladenosine-3'-phosphate
  modified_base 9: mod_base = OTHER; note = 2'-fluorouridine-3'-phosphate
  modified_base 10: mod_base = OTHER; note = 2'-fluoroguanosine-3'-phosphate
  modified_base 11: mod_base = OTHER; note = 2'-fluorocytidine-3'-phosphate
  modified_base 12: mod_base = OTHER; note = 2'-O-methyluridine-3'-phosphate
  modified_base 13: mod_base = OTHER; note = 2'-O-methyladenosine-3'-phosphate
  modified_base 14: mod_base = OTHER; note = 2'-O-methyladenosine-3'-phosphate
  modified_base 15: mod_base = OTHER; note = 2'-O-methyladenosine-3'-phosphate
  modified_base 16: mod_base = OTHER; note = 2'-O-methyluridine-3'-phosphate
  modified_base 17: mod_base = OTHER; note = 2'-O-methylcytidine-3'-phosphate
  modified_base 18: mod_base = OTHER; note = 2'-O-methyladenosine-3'-phosphate
  modified_base 19: mod_base = OTHER; note = 2'-O-methylguanosine-3'-phosphate
  modified_base 20: mod_base = OTHER; note = 2'-O-methyluridine-3'-phosphate
  modified_base 21: mod_base = OTHER; note = 2'-O-methyladenosine-3'-phosphate attached to N-[tris(N-acetylgalactosamine-alkyl)-amidodecanoyl)]-4-hydr oxyprolinol Hyp-(N-acetylgalactosamine-alkyl)3
gaacaacatgctaaatcagta

SEQ ID NO: 2945 - RNA, 23 nt, synthetic construct
  misc_feature 1..23: note = Description of Artificial Sequence: Synthetic oligonucleotide
  source 1..23: mol_type = other RNA
  modified_base 1: mod_base = OTHER; note = 2'-O-methyluridine-3'-phosphorothioate
  modified_base 2: mod_base = OTHER; note = 2'-fluoroadenosine-3'-phosphorothioate
  modified_base 3: mod_base = OTHER; note = 2'-O-methylcytidine-3'-phosphate
  modified_base 4: mod_base = OTHER; note = 2'-O-methyluridine-3'-phosphate
  modified_base 5: mod_base = OTHER; note = 2'-O-methylguanosine-3'-phosphate
  modified_base 6: mod_base = OTHER; note = 2'-fluoroadenosine-3'-phosphate
  modified_base 7: mod_base = OTHER; note = 2'-O-methyluridine-3'-phosphate
  modified_base 8: mod_base = OTHER; note = 2'-fluorouridine-3'-phosphate
  modified_base 9: mod_base = OTHER; note = 2'-fluorouridine-3'-phosphate
  modified_base 10: mod_base = OTHER; note = 2'-O-methyladenosine-3'-phosphate
  modified_base 11: mod_base = OTHER; note = 2'-O-methylguanosine-3'-phosphate
  modified_base 12: mod_base = OTHER; note = 2'-O-methylcytidine-3'-phosphate
  modified_base 13: mod_base = OTHER; note = 2'-O-methyladenosine-3'-phosphate
  modified_base 14: mod_base = OTHER; note = 2'-fluorouridine-3'-phosphate
  modified_base 15: mod_base = OTHER; note = 2'-O-methylguanosine-3'-phosphate
  modified_base 16: mod_base = OTHER; note = 2'-fluorouridine-3'-phosphate
  modified_base 17: mod_base = OTHER; note = 2'-O-methyluridine-3'-phosphate
  modified_base 18: mod_base = OTHER; note = 2'-O-methylguanosine-3'-phosphate
  modified_base 19: mod_base = OTHER; note = 2'-O-methyluridine-3'-phosphate
  modified_base 20: mod_base = OTHER; note = 2'-O-methyluridine-3'-phosphate
  modified_base 21: mod_base = OTHER; note = 2'-O-methylcytidine-3'- phosphorothioate
  modified_base 22: mod_base = OTHER; note = 2'-O-methyladenosine-3'- phosphorothioate
  modified_base 23: mod_base = OTHER; note = 2'-O-methyluridine-3'-phosphate
tactgatttagcatgttgttcat

SEQ ID NO: 2946 - RNA, 21 nt, synthetic construct
  misc_feature 1..21: note = Description of Artificial Sequence: Synthetic oligonucleotide
  source 1..21: mol_type = other RNA
  modified_base 1: mod_base = OTHER; note = 2'-O-methylguanosine-3'- phosphorothioate
  modified_base 2: mod_base = OTHER; note = 2'-O-methyladenosine-3'- phosphorothioate
  modified_base 3: mod_base = OTHER; note = 2'-O-methyladenosine-3'-phosphate
  modified_base 4: mod_base = OTHER; note = 2'-O-methyladenosine-3'-phosphate
  modified_base 5: mod_base = OTHER; note = 2'-O-methylguanosine-3'-phosphate
  modified_base 6: mod_base = OTHER; note = 2'-O-methylguanosine-3'-phosphate
  modified_base 7: mod_base = OTHER; note = 2'-fluorocytidine-3'-phosphate
  modified_base 8: mod_base = OTHER; note = 2'-O-methyladenosine-3'-phosphate
  modified_base 9: mod_base = OTHER; note = 2'-fluorocytidine-3'-phosphate
  modified_base 10: mod_base = OTHER; note = 2'-fluorouridine-3'-phosphate
  modified_base 11: mod_base = OTHER; note = 2'-fluoroguanosine-3'-phosphate
  modified_base 12: mod_base = OTHER; note = 2'-O-methyladenosine-3'-phosphate
  modified_base 13: mod_base = OTHER; note = 2'-O-methyluridine-3'-phosphate
  modified_base 14: mod_base = OTHER; note = 2'-O-methylguanosine-3'-phosphate
  modified_base 15: mod_base = OTHER; note = 2'-O-methyluridine-3'-phosphate
  modified_base 16: mod_base = OTHER; note = 2'-O-methyluridine-3'-phosphate
  modified_base 17: mod_base = OTHER; note = 2'-O-methylcytidine-3'-phosphate
  modified_base 18: mod_base = OTHER; note = 2'-O-methyluridine-3'-phosphate
  modified_base 19: mod_base = OTHER; note = 2'-O-methylguanosine-3'-phosphate
  modified_base 20: mod_base = OTHER; note = 2'-O-methyladenosine-3'-phosphate
  modified_base 21: mod_base = OTHER; note = 2'-O-methyladenosine-3'-phosphate attached to N-[tris(N-acetylgalactosamine-alkyl)-amidodecanoyl)]-4-hydr oxyprolinol Hyp-(N-acetylgalactosamine-alkyl)3
gaaaggcactgatgttctgaa

SEQ ID NO: 2947 - RNA, 23 nt, synthetic construct
  misc_feature 1..23: note = Description of Artificial Sequence: Synthetic oligonucleotide
  source 1..23: mol_type = other RNA
  modified_base 1: mod_base = OTHER; note = 2'-O-methyluridine-3'-phosphorothioate
  modified_base 2: mod_base = OTHER; note = 2'-fluorouridine -3'-phosphorothioate
  modified_base 3: mod_base = OTHER; note = 2'-O-methylcytidine-3'-phosphate
  modified_base 4: mod_base = OTHER; note = 2'-O-methyladenosine-3'-phosphate
  modified_base 5: mod_base = OTHER; note = 2'-O-methylguanosine-3'-phosphate
  modified_base 6: mod_base = OTHER; note = 2'-fluoroadenosine-3'-phosphate
  modified_base 7: mod_base = OTHER; note = 2'-O-methyladenosine-3'-phosphate
  modified_base 8: mod_base = OTHER; note = 2'-fluorocytidine-3'-phosphate
  modified_base 9: mod_base = OTHER; note = 2'-fluoroadenosine-3'-phosphate
  modified_base 10: mod_base = OTHER; note = 2'-O-methyluridine-3'-phosphate
  modified_base 11: mod_base = OTHER; note = 2'-O-methylcytidine-3'-phosphate
  modified_base 12: mod_base = OTHER; note = 2'-O-methyladenosine-3'-phosphate
  modified_base 13: mod_base = OTHER; note = 2'-O-methylguanosine-3'-phosphate
  modified_base 14: mod_base = OTHER; note = 2'-fluorouridine-3'-phosphate
  modified_base 15: mod_base = OTHER; note = 2'-O-methylguanosine-3'-phosphate
  modified_base 16: mod_base = OTHER; note = 2'-fluorocytidine-3'-phosphate
  modified_base 17: mod_base = OTHER; note = 2'-O-methylcytidine-3'-phosphate
  modified_base 18: mod_base = OTHER; note = 2'-O-methyluridine-3'-phosphate
  modified_base 19: mod_base = OTHER; note = 2'-O-methyluridine-3'-phosphate
  modified_base 20: mod_base = OTHER; note = 2'-O-methyluridine-3'-phosphate
  modified_base 21: mod_base = OTHER; note = 2'-O-methylcytidine-3'- phosphorothioate
  modified_base 22: mod_base = OTHER; note = 2'-O-methylcytidine-3'- phosphorothioate
  modified_base 23: mod_base = OTHER; note = 2'-O-methylguanosine-3'-phosphate
ttcagaacatcagtgcctttccg

SEQ ID NO: 2948 - RNA, 21 nt, synthetic construct
  misc_feature 1..21: note = Description of Artificial Sequence: Synthetic oligonucleotide
  source 1..21: mol_type = other RNA
  modified_base 1: mod_base = OTHER; note = 2'-O-methyladenosine-3'- phosphorothioate
  modified_base 2: mod_base = OTHER; note = 2'-O-methyladenosine-3'- phosphorothioate
  modified_base 3: mod_base = OTHER; note = 2'-O-methyladenosine-3'-phosphate
  modified_base 4: mod_base = OTHER; note = 2'-O-methylguanosine-3'-phosphate
  modified_base 5: mod_base = OTHER; note = 2'-O-methylguanosine-3'-phosphate
  modified_base 6: mod_base = OTHER; note = 2'-O-methylcytidine-3'-phosphate
  modified_base 7: mod_base = OTHER; note = 2'-fluoroadenosine-3'-phosphate
  modified_base 8: mod_base = OTHER; note = 2'-O-methylcytidine-3'-phosphate
  modified_base 9: mod_base = OTHER; note = 2'-fluorouridine-3'-phosphate
  modified_base 10: mod_base = OTHER; note = 2'-fluoroguanosine-3'-phosphate
  modified_base 11: mod_base = OTHER; note = 2'-fluoroadenosine-3'-phosphate
  modified_base 12: mod_base = OTHER; note = 2'-O-methyluridine-3'-phosphate
  modified_base 13: mod_base = OTHER; note = 2'-O-methylguanosine-3'-phosphate
  modified_base 14: mod_base = OTHER; note = 2'-O-methyluridine-3'-phosphate
  modified_base 15: mod_base = OTHER; note = 2'-O-methyluridine-3'-phosphate
  modified_base 16: mod_base = OTHER; note = 2'-O-methylcytidine-3'-phosphate
  modified_base 17: mod_base = OTHER; note = 2'-O-methyluridine-3'-phosphate
  modified_base 18: mod_base = OTHER; note = 2'-O-methylguanosine-3'-phosphate
  modified_base 19: mod_base = OTHER; note = 2'-O-methyladenosine-3'-phosphate
  modified_base 20: mod_base = OTHER; note = 2'-O-methyladenosine-3'-phosphate
  modified_base 21: mod_base = OTHER; note = 2'-O-methyladenosine-3'-phosphate attached to N-[tris(N-acetylgalactosamine-alkyl)-amidodecanoyl)]-4-hydr oxyprolinol Hyp-(N-acetylgalactosamine-alkyl)3
aaaggcactgatgttctgaaa

SEQ ID NO: 2949 - RNA, 23 nt, synthetic construct
  misc_feature 1..23: note = Description of Artificial Sequence: Synthetic oligonucleotide
  source 1..23: mol_type = other RNA
  modified_base 1: mod_base = OTHER; note = 2'-O-methyluridine-3'-phosphorothioate
  modified_base 2: mod_base = OTHER; note = 2'-fluorouridine -3'-phosphorothioate
  modified_base 3: mod_base = OTHER; note = 2'-O-methyluridine-3'-phosphate
  modified_base 4: mod_base = OTHER; note = 2'-O-methylcytidine-3'-phosphate
  modified_base 5: mod_base = OTHER; note = 2'-O-methyladenosine-3'-phosphate
  modified_base 6: mod_base = OTHER; note = 2'-fluoroguanosine-3'-phosphate
  modified_base 7: mod_base = OTHER; note = 2'-O-methyladenosine-3'-phosphate
  modified_base 8: mod_base = OTHER; note = 2'-fluoroadenosine-3'-phosphate
  modified_base 9: mod_base = OTHER; note = 2'-fluorocytidine-3'-phosphate
  modified_base 10: mod_base = OTHER; note = 2'-O-methyladenosine-3'-phosphate
  modified_base 11: mod_base = OTHER; note = 2'-O-methyluridine-3'-phosphate
  modified_base 12: mod_base = OTHER; note = 2'-O-methylcytidine-3'-phosphate
  modified_base 13: mod_base = OTHER; note = 2'-O-methyladenosine-3'-phosphate
  modified_base 14: mod_base = OTHER; note = 2'-fluoroguanosine-3'-phosphate
  modified_base 15: mod_base = OTHER; note = 2'-O-methyluridine-3'-phosphate
  modified_base 16: mod_base = OTHER; note = 2'-fluoroguanosine-3'-phosphate
  modified_base 17: mod_base = OTHER; note = 2'-O-methylcytidine-3'-phosphate
  modified_base 18: mod_base = OTHER; note = 2'-O-methylcytidine-3'-phosphate
  modified_base 19: mod_base = OTHER; note = 2'-O-methyluridine-3'-phosphate
  modified_base 20: mod_base = OTHER; note = 2'-O-methyluridine-3'-phosphate
  modified_base 21: mod_base = OTHER; note = 2'-O-methyluridine-3'-phosphorothioate
  modified_base 22: mod_base = OTHER; note = 2'-O-methylcytidine-3'- phosphorothioate
  modified_base 23: mod_base = OTHER; note = 2'-O-methylcytidine-3'-phosphate
tttcagaacatcagtgcctttcc

SEQ ID NO: 2950 - RNA, 21 nt, synthetic construct
  misc_feature 1..21: note = Description of Artificial Sequence: Synthetic oligonucleotide
  source 1..21: mol_type = other RNA
  modified_base 1: mod_base = OTHER; note = 2'-O-methyluridine-3'-phosphorothioate
  modified_base 2: mod_base = OTHER; note = 2'-O-methylguanosine-3'- phosphorothioate
  modified_base 3: mod_base = OTHER; note = 2'-O-methylcytidine-3'-phosphate
  modified_base 4: mod_base = OTHER; note = 2'-O-methylguanosine-3'-phosphate
  modified_base 5: mod_base = OTHER; note = 2'-O-methylguanosine-3'-phosphate
  modified_base 6: mod_base = OTHER; note = 2'-O-methyladenosine-3'-phosphate
  modified_base 7: mod_base = OTHER; note = 2'-fluoroadenosine-3'-phosphate
  modified_base 8: mod_base = OTHER; note = 2'-O-methyladenosine-3'-phosphate
  modified_base 9: mod_base = OTHER; note = 2'-fluoroguanosine-3'-phosphate
  modified_base 10: mod_base = OTHER; note = 2'-fluoroguanosine-3'-phosphate
  modified_base 11: mod_base = OTHER; note = 2'-fluorocytidine-3'-phosphate
  modified_base 12: mod_base = OTHER; note = 2'-O-methyladenosine-3'-phosphate
  modified_base 13: mod_base = OTHER; note = 2'-O-methylcytidine-3'-phosphate
  modified_base 14: mod_base = OTHER; note = 2'-O-methyluridine-3'-phosphate
  modified_base 15: mod_base = OTHER; note = 2'-O-methylguanosine-3'-phosphate
  modified_base 16: mod_base = OTHER; note = 2'-O-methyladenosine-3'-phosphate
  modified_base 17: mod_base = OTHER; note = 2'-O-methyluridine-3'-phosphate
  modified_base 18: mod_base = OTHER; note = 2'-O-methylguanosine-3'-phosphate
  modified_base 19: mod_base = OTHER; note = 2'-O-methyluridine-3'-phosphate
  modified_base 20: mod_base = OTHER; note = 2'-O-methyluridine-3'-phosphate
  modified_base 21: mod_base = OTHER; note = 2'-O-methylcytidine-3'-phosphate attached to N-[tris(N-acetylgalactosamine-alkyl)-amidodecanoyl)]-4-hydr oxyprolinol Hyp-(N-acetylgalactosamine-alkyl)3
tgcggaaaggcactgatgttc

SEQ ID NO: 2951 - RNA, 23 nt, synthetic construct
  misc_feature 1..23: note = Description of Artificial Sequence: Synthetic oligonucleotide
  source 1..23: mol_type = other RNA
  modified_base 1: mod_base = OTHER; note = 2'-O-methylguanosine-3'- phosphorothioate
  modified_base 2: mod_base = OTHER; note = 2'-fluoroadenosine-3'-phosphorothioate
  modified_base 3: mod_base = OTHER; note = 2'-O-methyladenosine-3'-phosphate
  modified_base 4: mod_base = OTHER; note = 2'-O-methylcytidine-3'-phosphate
  modified_base 5: mod_base = OTHER; note = 2'-O-methyladenosine-3'-phosphate
  modified_base 6: mod_base = OTHER; note = 2'-fluorouridine-3'-phosphate
  modified_base 7: mod_base = OTHER; note = 2'-O-methylcytidine-3'-phosphate
  modified_base 8: mod_base = OTHER; note = 2'-fluoroadenosine-3'-phosphate
  modified_base 9: mod_base = OTHER; note = 2'-fluoroguanosine-3'-phosphate
  modified_base 10: mod_base = OTHER; note = 2'-O-methyluridine-3'-phosphate
  modified_base 11: mod_base = OTHER; note = 2'-O-methylguanosine-3'-phosphate
  modified_base 12: mod_base = OTHER; note = 2'-O-methylcytidine-3'-phosphate
  modified_base 13: mod_base = OTHER; note = 2'-O-methylcytidine-3'-phosphate
  modified_base 14: mod_base = OTHER; note = 2'-fluorouridine-3'-phosphate
  modified_base 15: mod_base = OTHER; note = 2'-O-methyluridine-3'-phosphate
  modified_base 16: mod_base = OTHER; note = 2'-fluorouridine-3'-phosphate
  modified_base 17: mod_base = OTHER; note = 2'-O-methylcytidine-3'-phosphate
  modified_base 18: mod_base = OTHER; note = 2'-O-methylcytidine-3'-phosphate
  modified_base 19: mod_base = OTHER; note = 2'-O-methylguanosine-3'-phosphate
  modified_base 20: mod_base = OTHER; note = 2'-O-methylcytidine-3'-phosphate
  modified_base 21: mod_base = OTHER; note = 2'-O-methyladenosine-3'- phosphorothioate
  modified_base 22: mod_base = OTHER; note = 2'-O-methylcytidine-3'- phosphorothioate
  modified_base 23: mod_base = OTHER; note = 2'-O-methyladenosine-3'-phosphate
gaacatcagtgcctttccgcaca

SEQ ID NO: 2952 - RNA, 21 nt, synthetic construct
  misc_feature 1..21: note = Description of Artificial Sequence: Synthetic oligonucleotide
  source 1..21: mol_type = other RNA
  modified_base 1: mod_base = OTHER; note = 2'-O-methylguanosine-3'- phosphorothioate
  modified_base 2: mod_base = OTHER; note = 2'-O-methyluridine-3'-phosphorothioate
  modified_base 3: mod_base = OTHER; note = 2'-O-methylguanosine-3'-phosphate
  modified_base 4: mod_base = OTHER; note = 2'-O-methylcytidine-3'-phosphate
  modified_base 5: mod_base = OTHER; note = 2'-O-methylguanosine-3'-phosphate
  modified_base 6: mod_base = OTHER; note = 2'-O-methylguanosine-3'-phosphate
  modified_base 7: mod_base = OTHER; note = 2'-fluoroadenosine-3'-phosphate
  modified_base 8: mod_base = OTHER; note = 2'-O-methyladenosine-3'-phosphate
  modified_base 9: mod_base = OTHER; note = 2'-fluoroadenosine-3'-phosphate
  modified_base 10: mod_base = OTHER; note = 2'-fluoroguanosine-3'-phosphate
  modified_base 11: mod_base = OTHER; note = 2'-fluoroguanosine-3'-phosphate
  modified_base 12: mod_base = OTHER; note = 2'-O-methylcytidine-3'-phosphate
  modified_base 13: mod_base = OTHER; note = 2'-O-methyladenosine-3'-phosphate
  modified_base 14: mod_base = OTHER; note = 2'-O-methylcytidine-3'-phosphate
  modified_base 15: mod_base = OTHER; note = 2'-O-methyluridine-3'-phosphate
  modified_base 16: mod_base = OTHER; note = 2'-O-methylguanosine-3'-phosphate
  modified_base 17: mod_base = OTHER; note = 2'-O-methyladenosine-3'-phosphate
  modified_base 18: mod_base = OTHER; note = 2'-O-methyluridine-3'-phosphate
  modified_base 19: mod_base = OTHER; note = 2'-O-methylguanosine-3'-phosphate
  modified_base 20: mod_base = OTHER; note = 2'-O-methyluridine-3'-phosphate
  modified_base 21: mod_base = OTHER; note = 2'-O-methyluridine-3'-phosphate attached to N-[tris(N-acetylgalactosamine-alkyl)-amidodecanoyl)]-4-hydr oxyprolinol Hyp-(N-acetylgalactosamine-alkyl)3
gtgcggaaaggcactgatgtt

SEQ ID NO: 2953 - RNA, 23 nt, synthetic construct
  misc_feature 1..23: note = Description of Artificial Sequence: Synthetic oligonucleotide
  source 1..23: mol_type = other RNA
  modified_base 1: mod_base = OTHER; note = 2'-O-methyladenosine-3'- phosphorothioate
  modified_base 2: mod_base = OTHER; note = 2'-fluoroadenosine-3'-phosphorothioate
  modified_base 3: mod_base = OTHER; note = 2'-O-methylcytidine-3'-phosphate
  modified_base 4: mod_base = OTHER; note = 2'-O-methyladenosine-3'-phosphate
  modified_base 5: mod_base = OTHER; note = 2'-O-methyluridine-3'-phosphate
  modified_base 6: mod_base = OTHER; note = 2'-fluorocytidine-3'-phosphate
  modified_base 7: mod_base = OTHER; note = 2'-O-methyladenosine-3'-phosphate
  modified_base 8: mod_base = OTHER; note = 2'-fluoroguanosine-3'-phosphate
  modified_base 9: mod_base = OTHER; note = 2'-fluorouridine-3'-phosphate
  modified_base 10: mod_base = OTHER; note = 2'-O-methylguanosine-3'-phosphate
  modified_base 11: mod_base = OTHER; note = 2'-O-methylcytidine-3'-phosphate
  modified_base 12: mod_base = OTHER; note = 2'-O-methylcytidine-3'-phosphate
  modified_base 13: mod_base = OTHER; note = 2'-O-methyluridine-3'-phosphate
  modified_base 14: mod_base = OTHER; note = 2'-fluorouridine-3'-phosphate
  modified_base 15: mod_base = OTHER; note = 2'-O-methyluridine-3'-phosphate
  modified_base 16: mod_base = OTHER; note = 2'-fluorocytidine-3'-phosphate
  modified_base 17: mod_base = OTHER; note = 2'-O-methylcytidine-3'-phosphate
  modified_base 18: mod_base = OTHER; note = 2'-O-methylguanosine-3'-phosphate
  modified_base 19: mod_base = OTHER; note = 2'-O-methylcytidine-3'-phosphate
  modified_base 20: mod_base = OTHER; note = 2'-O-methyladenosine-3'-phosphate
  modified_base 21: mod_base = OTHER; note = 2'-O-methylcytidine-3'- phosphorothioate
  modified_base 22: mod_base = OTHER; note = 2'-O-methyladenosine-3'- phosphorothioate
  modified_base 23: mod_base = OTHER; note = 2'-O-methylcytidine-3'-phosphate
aacatcagtgcctttccgcacac

SEQ ID NO: 2954 - RNA, 21 nt, synthetic construct
  misc_feature 1..21: note = Description of Artificial Sequence: Synthetic oligonucleotide
  source 1..21: mol_type = other RNA
  modified_base 1: mod_base = OTHER; note = 2'-O-methylguanosine-3'- phosphorothioate
  modified_base 2: mod_base = OTHER; note = 2'-O-methyluridine-3'-phosphorothioate
  modified_base 3: mod_base = OTHER; note = 2'-O-methylcytidine-3'-phosphate
  modified_base 4: mod_base = OTHER; note = 2'-O-methyladenosine-3'-phosphate
  modified_base 5: mod_base = OTHER; note = 2'-O-methylguanosine-3'-phosphate
  modified_base 6: mod_base = OTHER; note = 2'-O-methylcytidine-3'-phosphate
  modified_base 7: mod_base = OTHER; note = 2'-fluoroadenosine-3'-phosphate
  modified_base 8: mod_base = OTHER; note = 2'-O-methyluridine-3'-phosphate
  modified_base 9: mod_base = OTHER; note = 2'-fluoroguanosine-3'-phosphate
  modified_base 10: mod_base = OTHER; note = 2'-fluorocytidine-3'-phosphate
  modified_base 11: mod_base = OTHER; note = 2'-fluorocytidine-3'-phosphate
  modified_base 12: mod_base = OTHER; note = 2'-O-methyladenosine-3'-phosphate
  modified_base 13: mod_base = OTHER; note = 2'-O-methyladenosine-3'-phosphate
  modified_base 14: mod_base = OTHER; note = 2'-O-methyluridine-3'-phosphate
  modified_base 15: mod_base = OTHER; note = 2'-O-methyladenosine-3'-phosphate
  modified_base 16: mod_base = OTHER; note = 2'-O-methyluridine-3'-phosphate
  modified_base 17: mod_base = OTHER; note = 2'-O-methylguanosine-3'-phosphate
  modified_base 18: mod_base = OTHER; note = 2'-O-methyluridine-3'-phosphate
  modified_base 19: mod_base = OTHER; note = 2'-O-methylguanosine-3'-phosphate
  modified_base 20: mod_base = OTHER; note = 2'-O-methyluridine-3'-phosphate
  modified_base 21: mod_base = OTHER; note = 2'-O-methylguanosine-3'-phosphate attached to N-[tris(N-acetylgalactosamine-alkyl)-amidodecanoyl)]-4-hydr oxyprolinol Hyp-(N-acetylgalactosamine-alkyl)3
gtcagcatgccaatatgtgtg

SEQ ID NO: 2955 - RNA, 23 nt, synthetic construct
  misc_feature 1..23: note = Description of Artificial Sequence: Synthetic oligonucleotide
  source 1..23: mol_type = other RNA
  modified_base 1: mod_base = OTHER; note = 2'-O-methylcytidine-3'- phosphorothioate
  modified_base 2: mod_base = OTHER; note = 2'-fluoroadenosine-3'-phosphorothioate
  modified_base 3: mod_base = OTHER; note = 2'-O-methylcytidine-3'-phosphate
  modified_base 4: mod_base = OTHER; note = 2'-O-methyladenosine-3'-phosphate
  modified_base 5: mod_base = OTHER; note = 2'-O-methylcytidine-3'-phosphate
  modified_base 6: mod_base = OTHER; note = 2'-fluoroadenosine-3'-phosphate
  modified_base 7: mod_base = OTHER; note = 2'-O-methyluridine-3'-phosphate
  modified_base 8: mod_base = OTHER; note = 2'-fluoroadenosine-3'-phosphate
  modified_base 9: mod_base = OTHER; note = 2'-fluorouridine-3'-phosphate
  modified_base 10: mod_base = OTHER; note = 2'-O-methyluridine-3'-phosphate
  modified_base 11: mod_base = OTHER; note = 2'-O-methylguanosine-3'-phosphate
  modified_base 12: mod_base = OTHER; note = 2'-O-methylguanosine-3'-phosphate
  modified_base 13: mod_base = OTHER; note = 2'-O-methylcytidine-3'-phosphate
  modified_base 14: mod_base = OTHER; note = 2'-fluoroadenosine-3'-phosphate
  modified_base 15: mod_base = OTHER; note = 2'-O-methyluridine-3'-phosphate
  modified_base 16: mod_base = OTHER; note = 2'-fluoroguanosine-3'-phosphate
  modified_base 17: mod_base = OTHER; note = 2'-O-methylcytidine-3'-phosphate
  modified_base 18: mod_base = OTHER; note = 2'-O-methyluridine-3'-phosphate
  modified_base 19: mod_base = OTHER; note = 2'-O-methylguanosine-3'-phosphate
  modified_base 20: mod_base = OTHER; note = 2'-O-methyladenosine-3'-phosphate
  modified_base 21: mod_base = OTHER; note = 2'-O-methylcytidine-3'- phosphorothioate
  modified_base 22: mod_base = OTHER; note = 2'-O-methylcytidine-3'- phosphorothioate
  modified_base 23: mod_base = OTHER; note = 2'-O-methylcytidine-3'-phosphate
cacacatattggcatgctgaccc

SEQ ID NO: 2956 - RNA, 21 nt, synthetic construct
  misc_feature 1..21: note = Description of Artificial Sequence: Synthetic oligonucleotide
  source 1..21: mol_type = other RNA
  modified_base 1: mod_base = OTHER; note = 2'-O-methyluridine-3'-phosphorothioate
  modified_base 2: mod_base = OTHER; note = 2'-O-methylcytidine-3'- phosphorothioate
  modified_base 3: mod_base = OTHER; note = 2'-O-methyladenosine-3'-phosphate
  modified_base 4: mod_base = OTHER; note = 2'-O-methylguanosine-3'-phosphate
  modified_base 5: mod_base = OTHER; note = 2'-O-methylcytidine-3'-phosphate
  modified_base 6: mod_base = OTHER; note = 2'-O-methyladenosine-3'-phosphate
  modified_base 7: mod_base = OTHER; note = 2'-fluorouridine-3'-phosphate
  modified_base 8: mod_base = OTHER; note = 2'-O-methylguanosine-3'-phosphate
  modified_base 9: mod_base = OTHER; note = 2'-fluorocytidine-3'-phosphate
  modified_base 10: mod_base = OTHER; note = 2'-fluorocytidine-3'-phosphate
  modified_base 11: mod_base = OTHER; note = 2'-fluoroadenosine-3'-phosphate
  modified_base 12: mod_base = OTHER; note = 2'-O-methyladenosine-3'-phosphate
  modified_base 13: mod_base = OTHER; note = 2'-O-methyluridine-3'-phosphate
  modified_base 14: mod_base = OTHER; note = 2'-O-methyladenosine-3'-phosphate
  modified_base 15: mod_base = OTHER; note = 2'-O-methyluridine-3'-phosphate
  modified_base 16: mod_base = OTHER; note = 2'-O-methylguanosine-3'-phosphate
  modified_base 17: mod_base = OTHER; note = 2'-O-methyluridine-3'-phosphate
  modified_base 18: mod_base = OTHER; note = 2'-O-methylguanosine-3'-phosphate
  modified_base 19: mod_base = OTHER; note = 2'-O-methyluridine-3'-phosphate
  modified_base 20: mod_base = OTHER; note = 2'-O-methylguanosine-3'-phosphate
  modified_base 21: mod_base = OTHER; note = 2'-O-methylguanosine-3'-phosphate attached to N-[tris(N-acetylgalactosamine-alkyl)-amidodecanoyl)]-4-hydr oxyprolinol Hyp-(N-acetylgalactosamine-alkyl)3
tcagcatgccaatatgtgtgg

SEQ ID NO: 2957 - RNA, 23 nt, synthetic construct
  misc_feature 1..23: note = Description of Artificial Sequence: Synthetic oligonucleotide
  source 1..23: mol_type = other RNA
  modified_base 1: mod_base = OTHER; note = 2'-O-methylcytidine-3'- phosphorothioate
  modified_base 2: mod_base = OTHER; note = 2'-fluorocytidine-3'-phosphorothioate
  modified_base 3: mod_base = OTHER; note = 2'-O-methyladenosine-3'-phosphate
  modified_base 4: mod_base = OTHER; note = 2'-O-methylcytidine-3'-phosphate
  modified_base 5: mod_base = OTHER; note = 2'-O-methyladenosine-3'-phosphate
  modified_base 6: mod_base = OTHER; note = 2'-fluorocytidine-3'-phosphate
  modified_base 7: mod_base = OTHER; note = 2'-O-methyladenosine-3'-phosphate
  modified_base 8: mod_base = OTHER; note = 2'-fluorouridine-3'-phosphate
  modified_base 9: mod_base = OTHER; note = 2'-fluoroadenosine-3'-phosphate
  modified_base 10: mod_base = OTHER; note = 2'-O-methyluridine-3'-phosphate
  modified_base 11: mod_base = OTHER; note = 2'-O-methyluridine-3'-phosphate
  modified_base 12: mod_base = OTHER; note = 2'-O-methylguanosine-3'-phosphate
  modified_base 13: mod_base = OTHER; note = 2'-O-methylguanosine-3'-phosphate
  modified_base 14: mod_base = OTHER; note = 2'-fluorocytidine-3'-phosphate
  modified_base 15: mod_base = OTHER; note = 2'-O-methyladenosine-3'-phosphate
  modified_base 16: mod_base = OTHER; note = 2'-fluorouridine-3'-phosphate
  modified_base 17: mod_base = OTHER; note = 2'-O-methylguanosine-3'-phosphate
  modified_base 18: mod_base = OTHER; note = 2'-O-methylcytidine-3'-phosphate
  modified_base 19: mod_base = OTHER; note = 2'-O-methyluridine-3'-phosphate
  modified_base 20: mod_base = OTHER; note = 2'-O-methylguanosine-3'-phosphate
  modified_base 21: mod_base = OTHER; note = 2'-O-methyladenosine-3'- phosphorothioate
  modified_base 22: mod_base = OTHER; note = 2'-O-methylcytidine-3'- phosphorothioate
  modified_base 23: mod_base = OTHER; note = 2'-O-methylcytidine-3'-phosphate
ccacacatattggcatgctgacc

SEQ ID NO: 2958 - RNA, 21 nt, synthetic construct
  misc_feature 1..21: note = Description of Artificial Sequence: Synthetic oligonucleotide
  source 1..21: mol_type = other RNA
  modified_base 1: mod_base = OTHER; note = 2'-O-methylguanosine-3'- phosphorothioate
  modified_base 2: mod_base = OTHER; note = 2'-O-methyladenosine-3'- phosphorothioate
  modified_base 3: mod_base = OTHER; note = 2'-O-methylguanosine-3'-phosphate
  modified_base 4: mod_base = OTHER; note = 2'-O-methylguanosine-3'-phosphate
  modified_base 5: mod_base = OTHER; note = 2'-O-methylguanosine-3'-phosphate
  modified_base 6: mod_base = OTHER; note = 2'-O-methyluridine-3'-phosphate
  modified_base 7: mod_base = OTHER; note = 2'-fluorocytidine-3'-phosphate
  modified_base 8: mod_base = OTHER; note = 2'-O-methyladenosine-3'-phosphate
  modified_base 9: mod_base = OTHER; note = 2'-fluoroguanosine-3'-phosphate
  modified_base 10: mod_base = OTHER; note = 2'-fluorocytidine-3'-phosphate
  modified_base 11: mod_base = OTHER; note = 2'-fluoroadenosine-3'-phosphate
  modified_base 12: mod_base = OTHER; note = 2'-O-methyluridine-3'-phosphate
  modified_base 13: mod_base = OTHER; note = 2'-O-methylguanosine-3'-phosphate
  modified_base 14: mod_base = OTHER; note = 2'-O-methylcytidine-3'-phosphate
  modified_base 15: mod_base = OTHER; note = 2'-O-methylcytidine-3'-phosphate
  modified_base 16: mod_base = OTHER; note = 2'-O-methyladenosine-3'-phosphate
  modified_base 17: mod_base = OTHER; note = 2'-O-methyladenosine-3'-phosphate
  modified_base 18: mod_base = OTHER; note = 2'-O-methyluridine-3'-phosphate
  modified_base 19: mod_base = OTHER; note = 2'-O-methyladenosine-3'-phosphate
  modified_base 20: mod_base = OTHER; note = 2'-O-methyluridine-3'-phosphate
  modified_base 21: mod_base = OTHER; note = 2'-O-methylguanosine-3'-phosphate attached to N-[tris(N-acetylgalactosamine-alkyl)-amidodecanoyl)]-4-hydr oxyprolinol Hyp-(N-acetylgalactosamine-alkyl)3
gagggtcagcatgccaatatg

SEQ ID NO: 2959 - RNA, 23 nt, synthetic construct
  misc_feature 1..23: note = Description of Artificial Sequence: Synthetic oligonucleotide
  source 1..23: mol_type = other RNA
  modified_base 1: mod_base = OTHER; note = 2'-O-methylcytidine-3'- phosphorothioate
  modified_base 2: mod_base = OTHER; note = 2'-fluoroadenosine-3'-phosphorothioate
  modified_base 3: mod_base = OTHER; note = 2'-O-methyluridine-3'-phosphate
  modified_base 4: mod_base = OTHER; note = 2'-O-methyladenosine-3'-phosphate
  modified_base 5: mod_base = OTHER; note = 2'-O-methyluridine-3'-phosphate
  modified_base 6: mod_base = OTHER; note = 2'-fluorouridine-3'-phosphate
  modified_base 7: mod_base = OTHER; note = 2'-O-methylguanosine-3'-phosphate
  modified_base 8: mod_base = OTHER; note = 2'-fluoroguanosine-3'-phosphate
  modified_base 9: mod_base = OTHER; note = 2'-fluorocytidine-3'-phosphate
  modified_base 10: mod_base = OTHER; note = 2'-O-methyladenosine-3'-phosphate
  modified_base 11: mod_base = OTHER; note = 2'-O-methyluridine-3'-phosphate
  modified_base 12: mod_base = OTHER; note = 2'-O-methylguanosine-3'-phosphate
  modified_base 13: mod_base = OTHER; note = 2'-O-methylcytidine-3'-phosphate
  modified_base 14: mod_base = OTHER; note = 2'-fluorouridine-3'-phosphate
  modified_base 15: mod_base = OTHER; note = 2'-O-methylguanosine-3'-phosphate
  modified_base 16: mod_base = OTHER; note = 2'-fluoroadenosine-3'-phosphate
  modified_base 17: mod_base = OTHER; note = 2'-O-methylcytidine-3'-phosphate
  modified_base 18: mod_base = OTHER; note = 2'-O-methylcytidine-3'-phosphate
  modified_base 19: mod_base = OTHER; note = 2'-O-methylcytidine-3'-phosphate
  modified_base 20: mod_base = OTHER; note = 2'-O-methyluridine-3'-phosphate
  modified_base 21: mod_base = OTHER; note = 2'-O-methylcytidine-3'- phosphorothioate
  modified_base 22: mod_base = OTHER; note = 2'-O-methyluridine-3'-phosphorothioate
  modified_base 23: mod_base = OTHER; note = 2'-O-methylguanosine-3'-phosphate
catattggcatgctgaccctctg

SEQ ID NO: 2960 - RNA, 21 nt, synthetic construct
  misc_feature 1..21: note = Description of Artificial Sequence: Synthetic oligonucleotide
  source 1..21: mol_type = other RNA
  modified_base 1: mod_base = OTHER; note = 2'-O-methyladenosine-3'- phosphorothioate
  modified_base 2: mod_base = OTHER; note = 2'-O-methylguanosine-3'- phosphorothioate
  modified_base 3: mod_base = OTHER; note = 2'-O-methyladenosine-3'-phosphate
  modified_base 4: mod_base = OTHER; note = 2'-O-methylguanosine-3'-phosphate
  modified_base 5: mod_base = OTHER; note = 2'-O-methylguanosine-3'-phosphate
  modified_base 6: mod_base = OTHER; note = 2'-O-methylguanosine-3'-phosphate
  modified_base 7: mod_base = OTHER; note = 2'-fluorouridine-3'-phosphate
  modified_base 8: mod_base = OTHER; note = 2'-O-methylcytidine-3'-phosphate
  modified_base 9: mod_base = OTHER; note = 2'-fluoroadenosine-3'-phosphate
  modified_base 10: mod_base = OTHER; note = 2'-fluoroguanosine-3'-phosphate
  modified_base 11: mod_base = OTHER; note = 2'-fluorocytidine-3'-phosphate
  modified_base 12: mod_base = OTHER; note = 2'-O-methyladenosine-3'-phosphate
  modified_base 13: mod_base = OTHER; note = 2'-O-methyluridine-3'-phosphate
  modified_base 14: mod_base = OTHER; note = 2'-O-methylguanosine-3'-phosphate
  modified_base 15: mod_base = OTHER; note = 2'-O-methylcytidine-3'-phosphate
  modified_base 16: mod_base = OTHER; note = 2'-O-methylcytidine-3'-phosphate
  modified_base 17: mod_base = OTHER; note = 2'-O-methyladenosine-3'-phosphate
  modified_base 18: mod_base = OTHER; note = 2'-O-methyladenosine-3'-phosphate
  modified_base 19: mod_base = OTHER; note = 2'-O-methyluridine-3'-phosphate
  modified_base 20: mod_base = OTHER; note = 2'-O-methyladenosine-3'-phosphate
  modified_base 21: mod_base = OTHER; note = 2'-O-methyluridine-3'-phosphate attached to N-[tris(N-acetylgalactosamine-alkyl)-amidodecanoyl)]-4-hydr oxyprolinol Hyp-(N-acetylgalactosamine-alkyl)3
agagggtcagcatgccaatat

SEQ ID NO: 2961 - RNA, 23 nt, synthetic construct
  misc_feature 1..23: note = Description of Artificial Sequence: Synthetic oligonucleotide
  source 1..23: mol_type = other RNA
  modified_base 1: mod_base = OTHER; note = 2'-O-methyladenosine-3'- phosphorothioate
  modified_base 2: mod_base = OTHER; note = 2'-fluorouridine -3'-phosphorothioate
  modified_base 3: mod_base = OTHER; note = 2'-O-methyladenosine-3'-phosphate
  modified_base 4: mod_base = OTHER; note = 2'-O-methyluridine-3'-phosphate
  modified_base 5: mod_base = OTHER; note = 2'-O-methyluridine-3'-phosphate
  modified_base 6: mod_base = OTHER; note = 2'-fluoroguanosine-3'-phosphate
  modified_base 7: mod_base = OTHER; note = 2'-O-methylguanosine-3'-phosphate
  modified_base 8: mod_base = OTHER; note = 2'-fluorocytidine-3'-phosphate
  modified_base 9: mod_base = OTHER; note = 2'-fluoroadenosine-3'-phosphate
  modified_base 10: mod_base = OTHER; note = 2'-O-methyluridine-3'-phosphate
  modified_base 11: mod_base = OTHER; note = 2'-O-methylguanosine-3'-phosphate
  modified_base 12: mod_base = OTHER; note = 2'-O-methylcytidine-3'-phosphate
  modified_base 13: mod_base = OTHER; note = 2'-O-methyluridine-3'-phosphate
  modified_base 14: mod_base = OTHER; note = 2'-fluoroguanosine-3'-phosphate
  modified_base 15: mod_base = OTHER; note = 2'-O-methyladenosine-3'-phosphate
  modified_base 16: mod_base = OTHER; note = 2'-fluorocytidine-3'-phosphate
  modified_base 17: mod_base = OTHER; note = 2'-O-methylcytidine-3'-phosphate
  modified_base 18: mod_base = OTHER; note = 2'-O-methylcytidine-3'-phosphate
  modified_base 19: mod_base = OTHER; note = 2'-O-methyluridine-3'-phosphate
  modified_base 20: mod_base = OTHER; note = 2'-O-methylcytidine-3'-phosphate
  modified_base 21: mod_base = OTHER; note = 2'-O-methyluridine-3'-phosphorothioate
  modified_base 22: mod_base = OTHER; note = 2'-O-methylguanosine-3'- phosphorothioate
  modified_base 23: mod_base = OTHER; note = 2'-O-methyluridine-3'-phosphate
atattggcatgctgaccctctgt

SEQ ID NO: 2962 - RNA, 21 nt, synthetic construct
  misc_feature 1..21: note = Description of Artificial Sequence: Synthetic oligonucleotide
  source 1..21: mol_type = other RNA
  modified_base 1: mod_base = OTHER; note = 2'-O-methylguanosine-3'- phosphorothioate
  modified_base 2: mod_base = OTHER; note = 2'-O-methyladenosine-3'- phosphorothioate
  modified_base 3: mod_base = OTHER; note = 2'-O-methyluridine-3'-phosphate
  modified_base 4: mod_base = OTHER; note = 2'-O-methylguanosine-3'-phosphate
  modified_base 5: mod_base = OTHER; note = 2'-O-methylcytidine-3'-phosphate
  modified_base 6: mod_base = OTHER; note = 2'-O-methyluridine-3'-phosphate
  modified_base 7: mod_base = OTHER; note = 2'-fluorocytidine-3'-phosphate
  modified_base 8: mod_base = OTHER; note = 2'-O-methylcytidine-3'-phosphate
  modified_base 9: mod_base = OTHER; note = 2'-fluoroguanosine-3'-phosphate
  modified_base 10: mod_base = OTHER; note = 2'-fluoroguanosine-3'-phosphate
  modified_base 11: mod_base = OTHER; note = 2'-fluoroadenosine-3'-phosphate
  modified_base 12: mod_base = OTHER; note = 2'-O-methyladenosine-3'-phosphate
  modified_base 13: mod_base = OTHER; note = 2'-O-methyluridine-3'-phosphate
  modified_base 14: mod_base = OTHER; note = 2'-O-methylguanosine-3'-phosphate
  modified_base 15: mod_base = OTHER; note = 2'-O-methyluridine-3'-phosphate
  modified_base 16: mod_base = OTHER; note = 2'-O-methyluridine-3'-phosphate
  modified_base 17: mod_base = OTHER; note = 2'-O-methylguanosine-3'-phosphate
  modified_base 18: mod_base = OTHER; note = 2'-O-methylcytidine-3'-phosphate
  modified_base 19: mod_base = OTHER; note = 2'-O-methyluridine-3'-phosphate
  modified_base 20: mod_base = OTHER; note = 2'-O-methylguanosine-3'-phosphate
  modified_base 21: mod_base = OTHER; note = 2'-O-methyladenosine-3'-phosphate attached to N-[tris(N-acetylgalactosamine-alkyl)-amidodecanoyl)]-4-hydr oxyprolinol Hyp-(N-acetylgalactosamine-alkyl)3
gatgctccggaatgttgctga

SEQ ID NO: 2963 - RNA, 23 nt, synthetic construct
  misc_feature 1..23: note = Description of Artificial Sequence: Synthetic oligonucleotide
  source 1..23: mol_type = other RNA
  modified_base 1: mod_base = OTHER; note = 2'-O-methyluridine-3'-phosphorothioate
  modified_base 2: mod_base = OTHER; note = 2'-fluorocytidine-3'-phosphorothioate
  modified_base 3: mod_base = OTHER; note = 2'-O-methyladenosine-3'-phosphate
  modified_base 4: mod_base = OTHER; note = 2'-O-methylguanosine-3'-phosphate
  modified_base 5: mod_base = OTHER; note = 2'-O-methylcytidine-3'-phosphate
  modified_base 6: mod_base = OTHER; note = 2'-fluoroadenosine-3'-phosphate
  modified_base 7: mod_base = OTHER; note = 2'-O-methyladenosine-3'-phosphate
  modified_base 8: mod_base = OTHER; note = 2'-fluorocytidine-3'-phosphate
  modified_base 9: mod_base = OTHER; note = 2'-fluoroadenosine-3'-phosphate
  modified_base 10: mod_base = OTHER; note = 2'-O-methyluridine-3'-phosphate
  modified_base 11: mod_base = OTHER; note = 2'-O-methyluridine-3'-phosphate
  modified_base 12: mod_base = OTHER; note = 2'-O-methylcytidine-3'-phosphate
  modified_base 13: mod_base = OTHER; note = 2'-O-methylcytidine-3'-phosphate
  modified_base 14: mod_base = OTHER; note = 2'-fluoroguanosine-3'-phosphate
  modified_base 15: mod_base = OTHER; note = 2'-O-methylguanosine-3'-phosphate
  modified_base 16: mod_base = OTHER; note = 2'-fluoroadenosine-3'-phosphate
  modified_base 17: mod_base = OTHER; note = 2'-O-methylguanosine-3'-phosphate
  modified_base 18: mod_base = OTHER; note = 2'-O-methylcytidine-3'-phosphate
  modified_base 19: mod_base = OTHER; note = 2'-O-methyladenosine-3'-phosphate
  modified_base 20: mod_base = OTHER; note = 2'-O-methyluridine-3'-phosphate
  modified_base 21: mod_base = OTHER; note = 2'-O-methylcytidine-3'- phosphorothioate
  modified_base 22: mod_base = OTHER; note = 2'-O-methylcytidine-3'- phosphorothioate
  modified_base 23: mod_base = OTHER; note = 2'-O-methyluridine-3'-phosphate
tcagcaacattccggagcatcct

SEQ ID NO: 2964 - RNA, 21 nt, synthetic construct
  misc_feature 1..21: note = Description of Artificial Sequence: Synthetic oligonucleotide
  source 1..21: mol_type = other RNA
  modified_base 1: mod_base = OTHER; note = 2'-O-methyladenosine-3'- phosphorothioate
  modified_base 2: mod_base = OTHER; note = 2'-O-methyluridine-3'-phosphorothioate
  modified_base 3: mod_base = OTHER; note = 2'-O-methylguanosine-3'-phosphate
  modified_base 4: mod_base = OTHER; note = 2'-O-methylcytidine-3'-phosphate
  modified_base 5: mod_base = OTHER; note = 2'-O-methyluridine-3'-phosphate
  modified_base 6: mod_base = OTHER; note = 2'-O-methylcytidine-3'-phosphate
  modified_base 7: mod_base = OTHER; note = 2'-fluorocytidine-3'-phosphate
  modified_base 8: mod_base = OTHER; note = 2'-O-methylguanosine-3'-phosphate
  modified_base 9: mod_base = OTHER; note = 2'-fluoroguanosine-3'-phosphate
  modified_base 10: mod_base = OTHER; note = 2'-fluoroadenosine-3'-phosphate
  modified_base 11: mod_base = OTHER; note = 2'-fluoroadenosine-3'-phosphate
  modified_base 12: mod_base = OTHER; note = 2'-O-methyluridine-3'-phosphate
  modified_base 13: mod_base = OTHER; note = 2'-O-methylguanosine-3'-phosphate
  modified_base 14: mod_base = OTHER; note = 2'-O-methyluridine-3'-phosphate
  modified_base 15: mod_base = OTHER; note = 2'-O-methyluridine-3'-phosphate
  modified_base 16: mod_base = OTHER; note = 2'-O-methylguanosine-3'-phosphate
  modified_base 17: mod_base = OTHER; note = 2'-O-methylcytidine-3'-phosphate
  modified_base 18: mod_base = OTHER; note = 2'-O-methyluridine-3'-phosphate
  modified_base 19: mod_base = OTHER; note = 2'-O-methylguanosine-3'-phosphate
  modified_base 20: mod_base = OTHER; note = 2'-O-methyladenosine-3'-phosphate
  modified_base 21: mod_base = OTHER; note = 2'-O-methyladenosine-3'-phosphate attached to N-[tris(N-acetylgalactosamine-alkyl)-amidodecanoyl)]-4-hydr oxyprolinol Hyp-(N-acetylgalactosamine-alkyl)3
atgctccggaatgttgctgaa

SEQ ID NO: 2965 - RNA, 23 nt, synthetic construct
  misc_feature 1..23: note = Description of Artificial Sequence: Synthetic oligonucleotide
  source 1..23: mol_type = other RNA
  modified_base 1: mod_base = OTHER; note = 2'-O-methyluridine-3'-phosphorothioate
  modified_base 2: mod_base = OTHER; note = 2'-fluorouridine -3'-phosphorothioate
  modified_base 3: mod_base = OTHER; note = 2'-O-methylcytidine-3'-phosphate
  modified_base 4: mod_base = OTHER; note = 2'-O-methyladenosine-3'-phosphate
  modified_base 5: mod_base = OTHER; note = 2'-O-methylguanosine-3'-phosphate
  modified_base 6: mod_base = OTHER; note = 2'-fluorocytidine-3'-phosphate
  modified_base 7: mod_base = OTHER; note = 2'-O-methyladenosine-3'-phosphate
  modified_base 8: mod_base = OTHER; note = 2'-fluoroadenosine-3'-phosphate
  modified_base 9: mod_base = OTHER; note = 2'-fluorocytidine-3'-phosphate
  modified_base 10: mod_base = OTHER; note = 2'-O-methyladenosine-3'-phosphate
  modified_base 11: mod_base = OTHER; note = 2'-O-methyluridine-3'-phosphate
  modified_base 12: mod_base = OTHER; note = 2'-O-methyluridine-3'-phosphate
  modified_base 13: mod_base = OTHER; note = 2'-O-methylcytidine-3'-phosphate
  modified_base 14: mod_base = OTHER; note = 2'-fluorocytidine-3'-phosphate
  modified_base 15: mod_base = OTHER; note = 2'-O-methylguanosine-3'-phosphate
  modified_base 16: mod_base = OTHER; note = 2'-fluoroguanosine-3'-phosphate
  modified_base 17: mod_base = OTHER; note = 2'-O-methyladenosine-3'-phosphate
  modified_base 18: mod_base = OTHER; note = 2'-O-methylguanosine-3'-phosphate
  modified_base 19: mod_base = OTHER; note = 2'-O-methylcytidine-3'-phosphate
  modified_base 20: mod_base = OTHER; note = 2'-O-methyladenosine-3'-phosphate
  modified_base 21: mod_base = OTHER; note = 2'-O-methyluridine-3'-phosphorothioate
  modified_base 22: mod_base = OTHER; note = 2'-O-methylcytidine-3'- phosphorothioate
  modified_base 23: mod_base = OTHER; note = 2'-O-methylcytidine-3'-phosphate
ttcagcaacattccggagcatcc

SEQ ID NO: 2966 - RNA, 21 nt, synthetic construct
  misc_feature 1..21: note = Description of Artificial Sequence: Synthetic oligonucleotide
  source 1..21: mol_type = other RNA
  modified_base 1: mod_base = OTHER; note = 2'-O-methylcytidine-3'- phosphorothioate
  modified_base 2: mod_base = OTHER; note = 2'-O-methyladenosine-3'- phosphorothioate
  modified_base 3: mod_base = OTHER; note = 2'-O-methyladenosine-3'-phosphate
  modified_base 4: mod_base = OTHER; note = 2'-O-methylguanosine-3'-phosphate
  modified_base 5: mod_base = OTHER; note = 2'-O-methylguanosine-3'-phosphate
  modified_base 6: mod_base = OTHER; note = 2'-O-methyladenosine-3'-phosphate
  modified_base 7: mod_base = OTHER; note = 2'-fluorouridine-3'-phosphate
  modified_base 8: mod_base = OTHER; note = 2'-O-methylguanosine-3'-phosphate
  modified_base 9: mod_base = OTHER; note = 2'-fluorocytidine-3'-phosphate
  modified_base 10: mod_base = OTHER; note = 2'-fluorouridine-3'-phosphate
  modified_base 11: mod_base = OTHER; note = 2'-fluorocytidine-3'-phosphate
  modified_base 12: mod_base = OTHER; note = 2'-O-methylcytidine-3'-phosphate
  modified_base 13: mod_base = OTHER; note = 2'-O-methylguanosine-3'-phosphate
  modified_base 14: mod_base = OTHER; note = 2'-O-methylguanosine-3'-phosphate
  modified_base 15: mod_base = OTHER; note = 2'-O-methyladenosine-3'-phosphate
  modified_base 16: mod_base = OTHER; note = 2'-O-methyladenosine-3'-phosphate
  modified_base 17: mod_base = OTHER; note = 2'-O-methyluridine-3'-phosphate
  modified_base 18: mod_base = OTHER; note = 2'-O-methylguanosine-3'-phosphate
  modified_base 19: mod_base = OTHER; note = 2'-O-methyluridine-3'-phosphate
  modified_base 20: mod_base = OTHER; note = 2'-O-methyluridine-3'-phosphate
  modified_base 21: mod_base = OTHER; note = 2'-O-methylguanosine-3'-phosphate attached to N-[tris(N-acetylgalactosamine-alkyl)-amidodecanoyl)]-4-hydr oxyprolinol Hyp-(N-acetylgalactosamine-alkyl)3
caaggatgctccggaatgttg

SEQ ID NO: 2967 - RNA, 23 nt, synthetic construct
  misc_feature 1..23: note = Description of Artificial Sequence: Synthetic oligonucleotide
  source 1..23: mol_type = other RNA
  modified_base 1: mod_base = OTHER; note = 2'-O-methylcytidine-3'- phosphorothioate
  modified_base 2: mod_base = OTHER; note = 2'-fluoroadenosine-3'-phosphorothioate
  modified_base 3: mod_base = OTHER; note = 2'-O-methyladenosine-3'-phosphate
  modified_base 4: mod_base = OTHER; note = 2'-O-methylcytidine-3'-phosphate
  modified_base 5: mod_base = OTHER; note = 2'-O-methyladenosine-3'-phosphate
  modified_base 6: mod_base = OTHER; note = 2'-fluorouridine-3'-phosphate
  modified_base 7: mod_base = OTHER; note = 2'-O-methyluridine-3'-phosphate
  modified_base 8: mod_base = OTHER; note = 2'-fluorocytidine-3'-phosphate
  modified_base 9: mod_base = OTHER; note = 2'-fluorocytidine-3'-phosphate
  modified_base 10: mod_base = OTHER; note = 2'-O-methylguanosine-3'-phosphate
  modified_base 11: mod_base = OTHER; note = 2'-O-methylguanosine-3'-phosphate
  modified_base 12: mod_base = OTHER; note = 2'-O-methyladenosine-3'-phosphate
  modified_base 13: mod_base = OTHER; note = 2'-O-methylguanosine-3'-phosphate
  modified_base 14: mod_base = OTHER; note = 2'-fluorocytidine-3'-phosphate
  modified_base 15: mod_base = OTHER; note = 2'-O-methyladenosine-3'-phosphate
  modified_base 16: mod_base = OTHER; note = 2'-fluorouridine-3'-phosphate
  modified_base 17: mod_base = OTHER; note = 2'-O-methylcytidine-3'-phosphate
  modified_base 18: mod_base = OTHER; note = 2'-O-methylcytidine-3'-phosphate
  modified_base 19: mod_base = OTHER; note = 2'-O-methyluridine-3'-phosphate
  modified_base 20: mod_base = OTHER; note = 2'-O-methyluridine-3'-phosphate
  modified_base 21: mod_base = OTHER; note = 2'-O-methylguanosine-3'- phosphorothioate
  modified_base 22: mod_base = OTHER; note = 2'-O-methylguanosine-3'- phosphorothioate
  modified_base 23: mod_base = OTHER; note = 2'-O-methyladenosine-3'-phosphate
caacattccggagcatccttgga

SEQ ID NO: 2968 - RNA, 21 nt, synthetic construct
  misc_feature 1..21: note = Description of Artificial Sequence: Synthetic oligonucleotide
  source 1..21: mol_type = other RNA
  modified_base 1: mod_base = OTHER; note = 2'-O-methylcytidine-3'- phosphorothioate
  modified_base 2: mod_base = OTHER; note = 2'-O-methylcytidine-3'- phosphorothioate
  modified_base 3: mod_base = OTHER; note = 2'-O-methyladenosine-3'-phosphate
  modified_base 4: mod_base = OTHER; note = 2'-O-methyladenosine-3'-phosphate
  modified_base 5: mod_base = OTHER; note = 2'-O-methylguanosine-3'-phosphate
  modified_base 6: mod_base = OTHER; note = 2'-O-methylguanosine-3'-phosphate
  modified_base 7: mod_base = OTHER; note = 2'-fluoroadenosine-3'-phosphate
  modified_base 8: mod_base = OTHER; note = 2'-O-methyluridine-3'-phosphate
  modified_base 9: mod_base = OTHER; note = 2'-fluoroguanosine-3'-phosphate
  modified_base 10: mod_base = OTHER; note = 2'-fluorocytidine-3'-phosphate
  modified_base 11: mod_base = OTHER; note = 2'-fluorouridine-3'-phosphate
  modified_base 12: mod_base = OTHER; note = 2'-O-methylcytidine-3'-phosphate
  modified_base 13: mod_base = OTHER; note = 2'-O-methylcytidine-3'-phosphate
  modified_base 14: mod_base = OTHER; note = 2'-O-methylguanosine-3'-phosphate
  modified_base 15: mod_base = OTHER; note = 2'-O-methylguanosine-3'-phosphate
  modified_base 16: mod_base = OTHER; note = 2'-O-methyladenosine-3'-phosphate
  modified_base 17: mod_base = OTHER; note = 2'-O-methyladenosine-3'-phosphate
  modified_base 18: mod_base = OTHER; note = 2'-O-methyluridine-3'-phosphate
  modified_base 19: mod_base = OTHER; note = 2'-O-methylguanosine-3'-phosphate
  modified_base 20: mod_base = OTHER; note = 2'-O-methyluridine-3'-phosphate
  modified_base 21: mod_base = OTHER; note = 2'-O-methyluridine-3'-phosphate attached to N-[tris(N-acetylgalactosamine-alkyl)-amidodecanoyl)]-4-hydr oxyprolinol Hyp-(N-acetylgalactosamine-alkyl)3
ccaaggatgctccggaatgtt

SEQ ID NO: 2969 - RNA, 23 nt, synthetic construct
  misc_feature 1..23: note = Description of Artificial Sequence: Synthetic oligonucleotide
  source 1..23: mol_type = other RNA
  modified_base 1: mod_base = OTHER; note = 2'-O-methyladenosine-3'- phosphorothioate
  modified_base 2: mod_base = OTHER; note = 2'-fluoroadenosine-3'-phosphorothioate
  modified_base 3: mod_base = OTHER; note = 2'-O-methylcytidine-3'-phosphate
  modified_base 4: mod_base = OTHER; note = 2'-O-methyladenosine-3'-phosphate
  modified_base 5: mod_base = OTHER; note = 2'-O-methyluridine-3'-phosphate
  modified_base 6: mod_base = OTHER; note = 2'-fluorouridine-3'-phosphate
  modified_base 7: mod_base = OTHER; note = 2'-O-methylcytidine-3'-phosphate
  modified_base 8: mod_base = OTHER; note = 2'-fluorocytidine-3'-phosphate
  modified_base 9: mod_base = OTHER; note = 2'-fluoroguanosine-3'-phosphate
  modified_base 10: mod_base = OTHER; note = 2'-O-methylguanosine-3'-phosphate
  modified_base 11: mod_base = OTHER; note = 2'-O-methyladenosine-3'-phosphate
  modified_base 12: mod_base = OTHER; note = 2'-O-methylguanosine-3'-phosphate
  modified_base 13: mod_base = OTHER; note = 2'-O-methylcytidine-3'-phosphate
  modified_base 14: mod_base = OTHER; note = 2'-fluoroadenosine-3'-phosphate
  modified_base 15: mod_base = OTHER; note = 2'-O-methyluridine-3'-phosphate
  modified_base 16: mod_base = OTHER; note = 2'-fluorocytidine-3'-phosphate
  modified_base 17: mod_base = OTHER; note = 2'-O-methylcytidine-3'-phosphate
  modified_base 18: mod_base = OTHER; note = 2'-O-methyluridine-3'-phosphate
  modified_base 19: mod_base = OTHER; note = 2'-O-methyluridine-3'-phosphate
  modified_base 20: mod_base = OTHER; note = 2'-O-methylguanosine-3'-phosphate
  modified_base 21: mod_base = OTHER; note = 2'-O-methylguanosine-3'- phosphorothioate
  modified_base 22: mod_base = OTHER; note = 2'-O-methyladenosine-3'- phosphorothioate
  modified_base 23: mod_base = OTHER; note = 2'-O-methyluridine-3'-phosphate
aacattccggagcatccttggat

SEQ ID NO: 2970 - RNA, 21 nt, synthetic construct
  misc_feature 1..21: note = Description of Artificial Sequence: Synthetic oligonucleotide
  source 1..21: mol_type = other RNA
  modified_base 1: mod_base = OTHER; note = 2'-O-methylguanosine-3'- phosphorothioate
  modified_base 2: mod_base = OTHER; note = 2'-O-methylcytidine-3'- phosphorothioate
  modified_base 3: mod_base = OTHER; note = 2'-O-methylguanosine-3'-phosphate
  modified_base 4: mod_base = OTHER; note = 2'-O-methyluridine-3'-phosphate
  modified_base 5: mod_base = OTHER; note = 2'-O-methyladenosine-3'-phosphate
  modified_base 6: mod_base = OTHER; note = 2'-O-methyladenosine-3'-phosphate
  modified_base 7: mod_base = OTHER; note = 2'-fluorocytidine-3'-phosphate
  modified_base 8: mod_base = OTHER; note = 2'-O-methyladenosine-3'-phosphate
  modified_base 9: mod_base = OTHER; note = 2'-fluoroguanosine-3'-phosphate
  modified_base 10: mod_base = OTHER; note = 2'-fluoroadenosine-3'-phosphate
  modified_base 11: mod_base = OTHER; note = 2'-fluorouridine-3'-phosphate
  modified_base 12: mod_base = OTHER; note = 2'-O-methyluridine-3'-phosphate
  modified_base 13: mod_base = OTHER; note = 2'-O-methylcytidine-3'-phosphate
  modified_base 14: mod_base = OTHER; note = 2'-O-methyladenosine-3'-phosphate
  modified_base 15: mod_base = OTHER; note = 2'-O-methyladenosine-3'-phosphate
  modified_base 16: mod_base = OTHER; note = 2'-O-methyladenosine-3'-phosphate
  modified_base 17: mod_base = OTHER; note = 2'-O-methylcytidine-3'-phosphate
  modified_base 18: mod_base = OTHER; note = 2'-O-methyluridine-3'-phosphate
  modified_base 19: mod_base = OTHER; note = 2'-O-methylguanosine-3'-phosphate
  modified_base 20: mod_base = OTHER; note = 2'-O-methylcytidine-3'-phosphate
  modified_base 21: mod_base = OTHER; note = 2'-O-methylcytidine-3'-phosphate attached to N-[tris(N-acetylgalactosamine-alkyl)-amidodecanoyl)]-4-hydr oxyprolinol Hyp-(N-acetylgalactosamine-alkyl)3
gcgtaacagattcaaactgcc

SEQ ID NO: 2971 - RNA, 23 nt, synthetic construct
  misc_feature 1..23: note = Description of Artificial Sequence: Synthetic oligonucleotide
  source 1..23: mol_type = other RNA
  modified_base 1: mod_base = OTHER; note = 2'-O-methylguanosine-3'- phosphorothioate
  modified_base 2: mod_base = OTHER; note = 2'-fluoroguanosine-3'-phosphorothioate
  modified_base 3: mod_base = OTHER; note = 2'-O-methylcytidine-3'-phosphate
  modified_base 4: mod_base = OTHER; note = 2'-O-methyladenosine-3'-phosphate
  modified_base 5: mod_base = OTHER; note = 2'-O-methylguanosine-3'-phosphate
  modified_base 6: mod_base = OTHER; note = 2'-fluorouridine-3'-phosphate
  modified_base 7: mod_base = OTHER; note = 2'-O-methyluridine-3'-phosphate
  modified_base 8: mod_base = OTHER; note = 2'-fluorouridine-3'-phosphate
  modified_base 9: mod_base = OTHER; note = 2'-fluoroguanosine-3'-phosphate
  modified_base 10: mod_base = OTHER; note = 2'-O-methyladenosine-3'-phosphate
  modified_base 11: mod_base = OTHER; note = 2'-O-methyladenosine-3'-phosphate
  modified_base 12: mod_base = OTHER; note = 2'-O-methyluridine-3'-phosphate
  modified_base 13: mod_base = OTHER; note = 2'-O-methylcytidine-3'-phosphate
  modified_base 14: mod_base = OTHER; note = 2'-fluorouridine-3'-phosphate
  modified_base 15: mod_base = OTHER; note = 2'-O-methylguanosine-3'-phosphate
  modified_base 16: mod_base = OTHER; note = 2'-fluorouridine-3'-phosphate
  modified_base 17: mod_base = OTHER; note = 2'-O-methyluridine-3'-phosphate
  modified_base 18: mod_base = OTHER; note = 2'-O-methyladenosine-3'-phosphate
  modified_base 19: mod_base = OTHER; note = 2'-O-methylcytidine-3'-phosphate
  modified_base 20: mod_base = OTHER; note = 2'-O-methylguanosine-3'-phosphate
  modified_base 21: mod_base = OTHER; note = 2'-O-methylcytidine-3'- phosphorothioate
  modified_base 22: mod_base = OTHER; note = 2'-O-methyladenosine-3'- phosphorothioate
  modified_base 23: mod_base = OTHER; note = 2'-O-methylcytidine-3'-phosphate
ggcagtttgaatctgttacgcac

SEQ ID NO: 2972 - RNA, 21 nt, synthetic construct
  misc_feature 1..21: note = Description of Artificial Sequence: Synthetic oligonucleotide
  source 1..21: mol_type = other RNA
  modified_base 1: mod_base = OTHER; note = 2'-O-methylcytidine-3'- phosphorothioate
  modified_base 2: mod_base = OTHER; note = 2'-O-methylguanosine-3'- phosphorothioate
  modified_base 3: mod_base = OTHER; note = 2'-O-methyluridine-3'-phosphate
  modified_base 4: mod_base = OTHER; note = 2'-O-methyladenosine-3'-phosphate
  modified_base 5: mod_base = OTHER; note = 2'-O-methyladenosine-3'-phosphate
  modified_base 6: mod_base = OTHER; note = 2'-O-methylcytidine-3'-phosphate
  modified_base 7: mod_base = OTHER; note = 2'-fluoroadenosine-3'-phosphate
  modified_base 8: mod_base = OTHER; note = 2'-O-methylguanosine-3'-phosphate
  modified_base 9: mod_base = OTHER; note = 2'-fluoroadenosine-3'-phosphate
  modified_base 10: mod_base = OTHER; note = 2'-fluorouridine-3'-phosphate
  modified_base 11: mod_base = OTHER; note = 2'-fluorouridine-3'-phosphate
  modified_base 12: mod_base = OTHER; note = 2'-O-methylcytidine-3'-phosphate
  modified_base 13: mod_base = OTHER; note = 2'-O-methyladenosine-3'-phosphate
  modified_base 14: mod_base = OTHER; note = 2'-O-methyladenosine-3'-phosphate
  modified_base 15: mod_base = OTHER; note = 2'-O-methyladenosine-3'-phosphate
  modified_base 16: mod_base = OTHER; note = 2'-O-methylcytidine-3'-phosphate
  modified_base 17: mod_base = OTHER; note = 2'-O-methyluridine-3'-phosphate
  modified_base 18: mod_base = OTHER; note = 2'-O-methylguanosine-3'-phosphate
  modified_base 19: mod_base = OTHER; note = 2'-O-methylcytidine-3'-phosphate
  modified_base 20: mod_base = OTHER; note = 2'-O-methylcytidine-3'-phosphate
  modified_base 21: mod_base = OTHER; note = 2'-O-methylguanosine-3'-phosphate attached to N-[tris(N-acetylgalactosamine-alkyl)-amidodecanoyl)]-4-hydr oxyprolinol Hyp-(N-acetylgalactosamine-alkyl)3
cgtaacagattcaaactgccg

SEQ ID NO: 2973 - RNA, 23 nt, synthetic construct
  misc_feature 1..23: note = Description of Artificial Sequence: Synthetic oligonucleotide
  source 1..23: mol_type = other RNA
  modified_base 1: mod_base = OTHER; note = 2'-O-methylcytidine-3'- phosphorothioate
  modified_base 2: mod_base = OTHER; note = 2'-fluoroguanosine-3'-phosphorothioate
  modified_base 3: mod_base = OTHER; note = 2'-O-methylguanosine-3'-phosphate
  modified_base 4: mod_base = OTHER; note = 2'-O-methylcytidine-3'-phosphate
  modified_base 5: mod_base = OTHER; note = 2'-O-methyladenosine-3'-phosphate
  modified_base 6: mod_base = OTHER; note = 2'-fluoroguanosine-3'-phosphate
  modified_base 7: mod_base = OTHER; note = 2'-O-methyluridine-3'-phosphate
  modified_base 8: mod_base = OTHER; note = 2'-fluorouridine-3'-phosphate
  modified_base 9: mod_base = OTHER; note = 2'-fluorouridine-3'-phosphate
  modified_base 10: mod_base = OTHER; note = 2'-O-methylguanosine-3'-phosphate
  modified_base 11: mod_base = OTHER; note = 2'-O-methyladenosine-3'-phosphate
  modified_base 12: mod_base = OTHER; note = 2'-O-methyladenosine-3'-phosphate
  modified_base 13: mod_base = OTHER; note = 2'-O-methyluridine-3'-phosphate
  modified_base 14: mod_base = OTHER; note = 2'-fluorocytidine-3'-phosphate
  modified_base 15: mod_base = OTHER; note = 2'-O-methyluridine-3'-phosphate
  modified_base 16: mod_base = OTHER; note = 2'-fluoroguanosine-3'-phosphate
  modified_base 17: mod_base = OTHER; note = 2'-O-methyluridine-3'-phosphate
  modified_base 18: mod_base = OTHER; note = 2'-O-methyluridine-3'-phosphate
  modified_base 19: mod_base = OTHER; note = 2'-O-methyladenosine-3'-phosphate
  modified_base 20: mod_base = OTHER; note = 2'-O-methylcytidine-3'-phosphate
  modified_base 21: mod_base = OTHER; note = 2'-O-methylguanosine-3'- phosphorothioate
  modified_base 22: mod_base = OTHER; note = 2'-O-methylcytidine-3'- phosphorothioate
  modified_base 23: mod_base = OTHER; note = 2'-O-methyladenosine-3'-phosphate
cggcagtttgaatctgttacgca

SEQ ID NO: 2974 - RNA, 21 nt, synthetic construct
  misc_feature 1..21: note = Description of Artificial Sequence: Synthetic oligonucleotide
  source 1..21: mol_type = other RNA
  modified_base 1: mod_base = OTHER; note = 2'-O-methyladenosine-3'- phosphorothioate
  modified_base 2: mod_base = OTHER; note = 2'-O-methyluridine-3'-phosphorothioate
  modified_base 3: mod_base = OTHER; note = 2'-O-methylguanosine-3'-phosphate
  modified_base 4: mod_base = OTHER; note = 2'-O-methyluridine-3'-phosphate
  modified_base 5: mod_base = OTHER; note = 2'-O-methylguanosine-3'-phosphate
  modified_base 6: mod_base = OTHER; note = 2'-O-methylcytidine-3'-phosphate
  modified_base 7: mod_base = OTHER; note = 2'-fluoroguanosine-3'-phosphate
  modified_base 8: mod_base = OTHER; note = 2'-O-methyluridine-3'-phosphate
  modified_base 9: mod_base = OTHER; note = 2'-fluoroadenosine-3'-phosphate
  modified_base 10: mod_base = OTHER; note = 2'-fluoroadenosine-3'-phosphate
  modified_base 11: mod_base = OTHER; note = 2'-fluorocytidine-3'-phosphate
  modified_base 12: mod_base = OTHER; note = 2'-O-methyladenosine-3'-phosphate
  modified_base 13: mod_base = OTHER; note = 2'-O-methylguanosine-3'-phosphate
  modified_base 14: mod_base = OTHER; note = 2'-O-methyladenosine-3'-phosphate
  modified_base 15: mod_base = OTHER; note = 2'-O-methyluridine-3'-phosphate
  modified_base 16: mod_base = OTHER; note = 2'-O-methyluridine-3'-phosphate
  modified_base 17: mod_base = OTHER; note = 2'-O-methylcytidine-3'-phosphate
  modified_base 18: mod_base = OTHER; note = 2'-O-methyladenosine-3'-phosphate
  modified_base 19: mod_base = OTHER; note = 2'-O-methyladenosine-3'-phosphate
  modified_base 20: mod_base = OTHER; note = 2'-O-methyladenosine-3'-phosphate
  modified_base 21: mod_base = OTHER; note = 2'-O-methylcytidine-3'-phosphate attached to N-[tris(N-acetylgalactosamine-alkyl)-amidodecanoyl)]-4-hydr oxyprolinol Hyp-(N-acetylgalactosamine-alkyl)3
atgtgcgtaacagattcaaac

SEQ ID NO: 2975 - RNA, 23 nt, synthetic construct
  misc_feature 1..23: note = Description of Artificial Sequence: Synthetic oligonucleotide
  source 1..23: mol_type = other RNA
  modified_base 1: mod_base = OTHER; note = 2'-O-methylguanosine-3'- phosphorothioate
  modified_base 2: mod_base = OTHER; note = 2'-fluorouridine -3'-phosphorothioate
  modified_base 3: mod_base = OTHER; note = 2'-O-methyluridine-3'-phosphate
  modified_base 4: mod_base = OTHER; note = 2'-O-methyluridine-3'-phosphate
  modified_base 5: mod_base = OTHER; note = 2'-O-methylguanosine-3'-phosphate
  modified_base 6: mod_base = OTHER; note = 2'-fluoroadenosine-3'-phosphate
  modified_base 7: mod_base = OTHER; note = 2'-O-methyladenosine-3'-phosphate
  modified_base 8: mod_base = OTHER; note = 2'-fluorouridine-3'-phosphate
  modified_base 9: mod_base = OTHER; note = 2'-fluorocytidine-3'-phosphate
  modified_base 10: mod_base = OTHER; note = 2'-O-methyluridine-3'-phosphate
  modified_base 11: mod_base = OTHER; note = 2'-O-methylguanosine-3'-phosphate
  modified_base 12: mod_base = OTHER; note = 2'-O-methyluridine-3'-phosphate
  modified_base 13: mod_base = OTHER; note = 2'-O-methyluridine-3'-phosphate
  modified_base 14: mod_base = OTHER; note = 2'-fluoroadenosine-3'-phosphate
  modified_base 15: mod_base = OTHER; note = 2'-O-methylcytidine-3'-phosphate
  modified_base 16: mod_base = OTHER; note = 2'-fluoroguanosine-3'-phosphate
  modified_base 17: mod_base = OTHER; note = 2'-O-methylcytidine-3'-phosphate
  modified_base 18: mod_base = OTHER; note = 2'-O-methyladenosine-3'-phosphate
  modified_base 19: mod_base = OTHER; note = 2'-O-methylcytidine-3'-phosphate
  modified_base 20: mod_base = OTHER; note = 2'-O-methyladenosine-3'-phosphate
  modified_base 21: mod_base = OTHER; note = 2'-O-methyluridine-3'-phosphorothioate
  modified_base 22: mod_base = OTHER; note = 2'-O-methylcytidine-3'- phosphorothioate
  modified_base 23: mod_base = OTHER; note = 2'-O-methyladenosine-3'-phosphate
gtttgaatctgttacgcacatca

SEQ ID NO: 2976 - RNA, 21 nt, synthetic construct
  misc_feature 1..21: note = Description of Artificial Sequence: Synthetic oligonucleotide
  source 1..21: mol_type = other RNA
  modified_base 1: mod_base = OTHER; note = 2'-O-methylguanosine-3'- phosphorothioate
  modified_base 2: mod_base = OTHER; note = 2'-O-methyladenosine-3'- phosphorothioate
  modified_base 3: mod_base = OTHER; note = 2'-O-methyluridine-3'-phosphate
  modified_base 4: mod_base = OTHER; note = 2'-O-methylguanosine-3'-phosphate
  modified_base 5: mod_base = OTHER; note = 2'-O-methyluridine-3'-phosphate
  modified_base 6: mod_base = OTHER; note = 2'-O-methylguanosine-3'-phosphate
  modified_base 7: mod_base = OTHER; note = 2'-fluorocytidine-3'-phosphate
  modified_base 8: mod_base = OTHER; note = 2'-O-methylguanosine-3'-phosphate
  modified_base 9: mod_base = OTHER; note = 2'-fluorouridine-3'-phosphate
  modified_base 10: mod_base = OTHER; note = 2'-fluoroadenosine-3'-phosphate
  modified_base 11: mod_base = OTHER; note = 2'-fluoroadenosine-3'-phosphate
  modified_base 12: mod_base = OTHER; note = 2'-O-methylcytidine-3'-phosphate
  modified_base 13: mod_base = OTHER; note = 2'-O-methyladenosine-3'-phosphate
  modified_base 14: mod_base = OTHER; note = 2'-O-methylguanosine-3'-phosphate
  modified_base 15: mod_base = OTHER; note = 2'-O-methyladenosine-3'-phosphate
  modified_base 16: mod_base = OTHER; note = 2'-O-methyluridine-3'-phosphate
  modified_base 17: mod_base = OTHER; note = 2'-O-methyluridine-3'-phosphate
  modified_base 18: mod_base = OTHER; note = 2'-O-methylcytidine-3'-phosphate
  modified_base 19: mod_base = OTHER; note = 2'-O-methyladenosine-3'-phosphate
  modified_base 20: mod_base = OTHER; note = 2'-O-methyladenosine-3'-phosphate
  modified_base 21: mod_base = OTHER; note = 2'-O-methyladenosine-3'-phosphate attached to N-[tris(N-acetylgalactosamine-alkyl)-amidodecanoyl)]-4-hydr oxyprolinol Hyp-(N-acetylgalactosamine-alkyl)3
gatgtgcgtaacagattcaaa

SEQ ID NO: 2977 - RNA, 23 nt, synthetic construct
  misc_feature 1..23: note = Description of Artificial Sequence: Synthetic oligonucleotide
  source 1..23: mol_type = other RNA
  modified_base 1: mod_base = OTHER; note = 2'-O-methyluridine-3'-phosphorothioate
  modified_base 2: mod_base = OTHER; note = 2'-fluorouridine -3'-phosphorothioate
  modified_base 3: mod_base = OTHER; note = 2'-O-methyluridine-3'-phosphate
  modified_base 4: mod_base = OTHER; note = 2'-O-methylguanosine-3'-phosphate
  modified_base 5: mod_base = OTHER; note = 2'-O-methyladenosine-3'-phosphate
  modified_base 6: mod_base = OTHER; note = 2'-fluoroadenosine-3'-phosphate
  modified_base 7: mod_base = OTHER; note = 2'-O-methyluridine-3'-phosphate
  modified_base 8: mod_base = OTHER; note = 2'-fluorocytidine-3'-phosphate
  modified_base 9: mod_base = OTHER; note = 2'-fluorouridine-3'-phosphate
  modified_base 10: mod_base = OTHER; note = 2'-O-methylguanosine-3'-phosphate
  modified_base 11: mod_base = OTHER; note = 2'-O-methyluridine-3'-phosphate
  modified_base 12: mod_base = OTHER; note = 2'-O-methyluridine-3'-phosphate
  modified_base 13: mod_base = OTHER; note = 2'-O-methyladenosine-3'-phosphate
  modified_base 14: mod_base = OTHER; note = 2'-fluorocytidine-3'-phosphate
  modified_base 15: mod_base = OTHER; note = 2'-O-methylguanosine-3'-phosphate
  modified_base 16: mod_base = OTHER; note = 2'-fluorocytidine-3'-phosphate
  modified_base 17: mod_base = OTHER; note = 2'-O-methyladenosine-3'-phosphate
  modified_base 18: mod_base = OTHER; note = 2'-O-methylcytidine-3'-phosphate
  modified_base 19: mod_base = OTHER; note = 2'-O-methyladenosine-3'-phosphate
  modified_base 20: mod_base = OTHER; note = 2'-O-methyluridine-3'-phosphate
  modified_base 21: mod_base = OTHER; note = 2'-O-methylcytidine-3'- phosphorothioate
  modified_base 22: mod_base = OTHER; note = 2'-O-methyladenosine-3'- phosphorothioate
  modified_base 23: mod_base = OTHER; note = 2'-O-methyluridine-3'-phosphate
tttgaatctgttacgcacatcat

SEQ ID NO: 2978 - RNA, 21 nt, synthetic construct
  misc_feature 1..21: note = Description of Artificial Sequence: Synthetic oligonucleotide
  source 1..21: mol_type = other RNA
  modified_base 1: mod_base = OTHER; note = 2'-O-methyladenosine-3'- phosphorothioate
  modified_base 2: mod_base = OTHER; note = 2'-O-methylguanosine-3'- phosphorothioate
  modified_base 3: mod_base = OTHER; note = 2'-O-methyladenosine-3'-phosphate
  modified_base 4: mod_base = OTHER; note = 2'-O-methylguanosine-3'-phosphate
  modified_base 5: mod_base = OTHER; note = 2'-O-methyladenosine-3'-phosphate
  modified_base 6: mod_base = OTHER; note = 2'-O-methyladenosine-3'-phosphate
  modified_base 7: mod_base = OTHER; note = 2'-fluoroguanosine-3'-phosphate
  modified_base 8: mod_base = OTHER; note = 2'-O-methyladenosine-3'-phosphate
  modified_base 9: mod_base = OTHER; note = 2'-fluorouridine-3'-phosphate
  modified_base 10: mod_base = OTHER; note = 2'-fluoroguanosine-3'-phosphate
  modified_base 11: mod_base = OTHER; note = 2'-fluoroguanosine-3'-phosphate
  modified_base 12: mod_base = OTHER; note = 2'-O-methylguanosine-3'-phosphate
  modified_base 13: mod_base = OTHER; note = 2'-O-methylcytidine-3'-phosphate
  modified_base 14: mod_base = OTHER; note = 2'-O-methyluridine-3'-phosphate
  modified_base 15: mod_base = OTHER; note = 2'-O-methyladenosine-3'-phosphate
  modified_base 16: mod_base = OTHER; note = 2'-O-methylcytidine-3'-phosphate
  modified_base 17: mod_base = OTHER; note = 2'-O-methyladenosine-3'-phosphate
  modified_base 18: mod_base = OTHER; note = 2'-O-methyladenosine-3'-phosphate
  modified_base 19: mod_base = OTHER; note = 2'-O-methylguanosine-3'-phosphate
  modified_base 20: mod_base = OTHER; note = 2'-O-methylguanosine-3'-phosphate
  modified_base 21: mod_base = OTHER; note = 2'-O-methylcytidine-3'-phosphate attached to N-[tris(N-acetylgalactosamine-alkyl)-amidodecanoyl)]-4-hydr oxyprolinol Hyp-(N-acetylgalactosamine-alkyl)3
agagaagatgggctacaaggc

SEQ ID NO: 2979 - RNA, 23 nt, synthetic construct
  misc_feature 1..23: note = Description of Artificial Sequence: Synthetic oligonucleotide
  source 1..23: mol_type = other RNA
  modified_base 1: mod_base = OTHER; note = 2'-O-methylguanosine-3'- phosphorothioate
  modified_base 2: mod_base = OTHER; note = 2'-fluorocytidine-3'-phosphorothioate
  modified_base 3: mod_base = OTHER; note = 2'-O-methylcytidine-3'-phosphate
  modified_base 4: mod_base = OTHER; note = 2'-O-methyluridine-3'-phosphate
  modified_base 5: mod_base = OTHER; note = 2'-O-methyluridine-3'-phosphate
  modified_base 6: mod_base = OTHER; note = 2'-fluoroguanosine-3'-phosphate
  modified_base 7: mod_base = OTHER; note = 2'-O-methyluridine-3'-phosphate
  modified_base 8: mod_base = OTHER; note = 2'-fluoroadenosine-3'-phosphate
  modified_base 9: mod_base = OTHER; note = 2'-fluoroguanosine-3'-phosphate
  modified_base 10: mod_base = OTHER; note = 2'-O-methylcytidine-3'-phosphate
  modified_base 11: mod_base = OTHER; note = 2'-O-methylcytidine-3'-phosphate
  modified_base 12: mod_base = OTHER; note = 2'-O-methylcytidine-3'-phosphate
  modified_base 13: mod_base = OTHER; note = 2'-O-methyladenosine-3'-phosphate
  modified_base 14: mod_base = OTHER; note = 2'-fluorouridine-3'-phosphate
  modified_base 15: mod_base = OTHER; note = 2'-O-methylcytidine-3'-phosphate
  modified_base 16: mod_base = OTHER; note = 2'-fluorouridine-3'-phosphate
  modified_base 17: mod_base = OTHER; note = 2'-O-methyluridine-3'-phosphate
  modified_base 18: mod_base = OTHER; note = 2'-O-methylcytidine-3'-phosphate
  modified_base 19: mod_base = OTHER; note = 2'-O-methyluridine-3'-phosphate
  modified_base 20: mod_base = OTHER; note = 2'-O-methylcytidine-3'-phosphate
  modified_base 21: mod_base = OTHER; note = 2'-O-methyluridine-3'-phosphorothioate
  modified_base 22: mod_base = OTHER; note = 2'-O-methylguanosine-3'- phosphorothioate
  modified_base 23: mod_base = OTHER; note = 2'-O-methylcytidine-3'-phosphate
gccttgtagcccatcttctctgc

SEQ ID NO: 2980 - RNA, 21 nt, synthetic construct
  misc_feature 1..21: note = Description of Artificial Sequence: Synthetic oligonucleotide
  source 1..21: mol_type = other RNA
  modified_base 1: mod_base = OTHER; note = 2'-O-methylguanosine-3'- phosphorothioate
  modified_base 2: mod_base = OTHER; note = 2'-O-methyladenosine-3'- phosphorothioate
  modified_base 3: mod_base = OTHER; note = 2'-O-methylguanosine-3'-phosphate
  modified_base 4: mod_base = OTHER; note = 2'-O-methyladenosine-3'-phosphate
  modified_base 5: mod_base = OTHER; note = 2'-O-methyladenosine-3'-phosphate
  modified_base 6: mod_base = OTHER; note = 2'-O-methylguanosine-3'-phosphate
  modified_base 7: mod_base = OTHER; note = 2'-fluoroadenosine-3'-phosphate
  modified_base 8: mod_base = OTHER; note = 2'-O-methyluridine-3'-phosphate
  modified_base 9: mod_base = OTHER; note = 2'-fluoroguanosine-3'-phosphate
  modified_base 10: mod_base = OTHER; note = 2'-fluoroguanosine-3'-phosphate
  modified_base 11: mod_base = OTHER; note = 2'-fluoroguanosine-3'-phosphate
  modified_base 12: mod_base = OTHER; note = 2'-O-methylcytidine-3'-phosphate
  modified_base 13: mod_base = OTHER; note = 2'-O-methyluridine-3'-phosphate
  modified_base 14: mod_base = OTHER; note = 2'-O-methyladenosine-3'-phosphate
  modified_base 15: mod_base = OTHER; note = 2'-O-methylcytidine-3'-phosphate
  modified_base 16: mod_base = OTHER; note = 2'-O-methyladenosine-3'-phosphate
  modified_base 17: mod_base = OTHER; note = 2'-O-methyladenosine-3'-phosphate
  modified_base 18: mod_base = OTHER; note = 2'-O-methylguanosine-3'-phosphate
  modified_base 19: mod_base = OTHER; note = 2'-O-methylguanosine-3'-phosphate
  modified_base 20: mod_base = OTHER; note = 2'-O-methylcytidine-3'-phosphate
  modified_base 21: mod_base = OTHER; note = 2'-O-methylcytidine-3'-phosphate attached to N-[tris(N-acetylgalactosamine-alkyl)-amidodecanoyl)]-4-hydr oxyprolinol Hyp-(N-acetylgalactosamine-alkyl)3
gagaagatgggctacaaggcc

SEQ ID NO: 2981 - RNA, 23 nt, synthetic construct
  misc_feature 1..23: note = Description of Artificial Sequence: Synthetic oligonucleotide
  source 1..23: mol_type = other RNA
  modified_base 1: mod_base = OTHER; note = 2'-O-methylguanosine-3'- phosphorothioate
  modified_base 2: mod_base = OTHER; note = 2'-fluoroguanosine-3'-phosphorothioate
  modified_base 3: mod_base = OTHER; note = 2'-O-methylcytidine-3'-phosphate
  modified_base 4: mod_base = OTHER; note = 2'-O-methylcytidine-3'-phosphate
  modified_base 5: mod_base = OTHER; note = 2'-O-methyluridine-3'-phosphate
  modified_base 6: mod_base = OTHER; note = 2'-fluorouridine-3'-phosphate
  modified_base 7: mod_base = OTHER; note = 2'-O-methylguanosine-3'-phosphate
  modified_base 8: mod_base = OTHER; note = 2'-fluorouridine-3'-phosphate
  modified_base 9: mod_base = OTHER; note = 2'-fluoroadenosine-3'-phosphate
  modified_base 10: mod_base = OTHER; note = 2'-O-methylguanosine-3'-phosphate
  modified_base 11: mod_base = OTHER; note = 2'-O-methylcytidine-3'-phosphate
  modified_base 12: mod_base = OTHER; note = 2'-O-methylcytidine-3'-phosphate
  modified_base 13: mod_base = OTHER; note = 2'-O-methylcytidine-3'-phosphate
  modified_base 14: mod_base = OTHER; note = 2'-fluoroadenosine-3'-phosphate
  modified_base 15: mod_base = OTHER; note = 2'-O-methyluridine-3'-phosphate
  modified_base 16: mod_base = OTHER; note = 2'-fluorocytidine-3'-phosphate
  modified_base 17: mod_base = OTHER; note = 2'-O-methyluridine-3'-phosphate
  modified_base 18: mod_base = OTHER; note = 2'-O-methyluridine-3'-phosphate
  modified_base 19: mod_base = OTHER; note = 2'-O-methylcytidine-3'-phosphate
  modified_base 20: mod_base = OTHER; note = 2'-O-methyluridine-3'-phosphate
  modified_base 21: mod_base = OTHER; note = 2'-O-methylcytidine-3'- phosphorothioate
  modified_base 22: mod_base = OTHER; note = 2'-O-methyluridine-3'-phosphorothioate
  modified_base 23: mod_base = OTHER; note = 2'-O-methylguanosine-3'-phosphate
ggccttgtagcccatcttctctg

SEQ ID NO: 2982 - RNA, 21 nt, synthetic construct
  misc_feature 1..21: note = Description of Artificial Sequence: Synthetic oligonucleotide
  source 1..21: mol_type = other RNA
  modified_base 1: mod_base = OTHER; note = 2'-O-methyladenosine-3'- phosphorothioate
  modified_base 2: mod_base = OTHER; note = 2'-O-methylguanosine-3'- phosphorothioate
  modified_base 3: mod_base = OTHER; note = 2'-O-methylguanosine-3'-phosphate
  modified_base 4: mod_base = OTHER; note = 2'-O-methylcytidine-3'-phosphate
  modified_base 5: mod_base = OTHER; note = 2'-O-methyladenosine-3'-phosphate
  modified_base 6: mod_base = OTHER; note = 2'-O-methylguanosine-3'-phosphate
  modified_base 7: mod_base = OTHER; note = 2'-fluoroadenosine-3'-phosphate
  modified_base 8: mod_base = OTHER; note = 2'-O-methylguanosine-3'-phosphate
  modified_base 9: mod_base = OTHER; note = 2'-fluoroadenosine-3'-phosphate
  modified_base 10: mod_base = OTHER; note = 2'-fluoroadenosine-3'-phosphate
  modified_base 11: mod_base = OTHER; note = 2'-fluoroguanosine-3'-phosphate
  modified_base 12: mod_base = OTHER; note = 2'-O-methyladenosine-3'-phosphate
  modified_base 13: mod_base = OTHER; note = 2'-O-methyluridine-3'-phosphate
  modified_base 14: mod_base = OTHER; note = 2'-O-methylguanosine-3'-phosphate
  modified_base 15: mod_base = OTHER; note = 2'-O-methylguanosine-3'-phosphate
  modified_base 16: mod_base = OTHER; note = 2'-O-methylguanosine-3'-phosphate
  modified_base 17: mod_base = OTHER; note = 2'-O-methylcytidine-3'-phosphate
  modified_base 18: mod_base = OTHER; note = 2'-O-methyluridine-3'-phosphate
  modified_base 19: mod_base = OTHER; note = 2'-O-methyladenosine-3'-phosphate
  modified_base 20: mod_base = OTHER; note = 2'-O-methylcytidine-3'-phosphate
  modified_base 21: mod_base = OTHER; note = 2'-O-methyladenosine-3'-phosphate attached to N-[tris(N-acetylgalactosamine-alkyl)-amidodecanoyl)]-4-hydr oxyprolinol Hyp-(N-acetylgalactosamine-alkyl)3
aggcagagaagatgggctaca

SEQ ID NO: 2983 - RNA, 23 nt, synthetic construct
  misc_feature 1..23: note = Description of Artificial Sequence: Synthetic oligonucleotide
  source 1..23: mol_type = other RNA
  modified_base 1: mod_base = OTHER; note = 2'-O-methyluridine-3'-phosphorothioate
  modified_base 2: mod_base = OTHER; note = 2'-fluoroguanosine-3'-phosphorothioate
  modified_base 3: mod_base = OTHER; note = 2'-O-methyluridine-3'-phosphate
  modified_base 4: mod_base = OTHER; note = 2'-O-methyladenosine-3'-phosphate
  modified_base 5: mod_base = OTHER; note = 2'-O-methylguanosine-3'-phosphate
  modified_base 6: mod_base = OTHER; note = 2'-fluorocytidine-3'-phosphate
  modified_base 7: mod_base = OTHER; note = 2'-O-methylcytidine-3'-phosphate
  modified_base 8: mod_base = OTHER; note = 2'-fluorocytidine-3'-phosphate
  modified_base 9: mod_base = OTHER; note = 2'-fluoroadenosine-3'-phosphate
  modified_base 10: mod_base = OTHER; note = 2'-O-methyluridine-3'-phosphate
  modified_base 11: mod_base = OTHER; note = 2'-O-methylcytidine-3'-phosphate
  modified_base 12: mod_base = OTHER; note = 2'-O-methyluridine-3'-phosphate
  modified_base 13: mod_base = OTHER; note = 2'-O-methyluridine-3'-phosphate
  modified_base 14: mod_base = OTHER; note = 2'-fluorocytidine-3'-phosphate
  modified_base 15: mod_base = OTHER; note = 2'-O-methyluridine-3'-phosphate
  modified_base 16: mod_base = OTHER; note = 2'-fluorocytidine-3'-phosphate
  modified_base 17: mod_base = OTHER; note = 2'-O-methyluridine-3'-phosphate
  modified_base 18: mod_base = OTHER; note = 2'-O-methylguanosine-3'-phosphate
  modified_base 19: mod_base = OTHER; note = 2'-O-methylcytidine-3'-phosphate
  modified_base 20: mod_base = OTHER; note = 2'-O-methylcytidine-3'-phosphate
  modified_base 21: mod_base = OTHER; note = 2'-O-methyluridine-3'-phosphorothioate
  modified_base 22: mod_base = OTHER; note = 2'-O-methylguanosine-3'- phosphorothioate
  modified_base 23: mod_base = OTHER; note = 2'-O-methylcytidine-3'-phosphate
tgtagcccatcttctctgcctgc

SEQ ID NO: 2984 - RNA, 21 nt, synthetic construct
  misc_feature 1..21: note = Description of Artificial Sequence: Synthetic oligonucleotide
  source 1..21: mol_type = other RNA
  modified_base 1: mod_base = OTHER; note = 2'-O-methylcytidine-3'- phosphorothioate
  modified_base 2: mod_base = OTHER; note = 2'-O-methyladenosine-3'- phosphorothioate
  modified_base 3: mod_base = OTHER; note = 2'-O-methylguanosine-3'-phosphate
  modified_base 4: mod_base = OTHER; note = 2'-O-methylguanosine-3'-phosphate
  modified_base 5: mod_base = OTHER; note = 2'-O-methylcytidine-3'-phosphate
  modified_base 6: mod_base = OTHER; note = 2'-O-methyladenosine-3'-phosphate
  modified_base 7: mod_base = OTHER; note = 2'-fluoroguanosine-3'-phosphate
  modified_base 8: mod_base = OTHER; note = 2'-O-methyladenosine-3'-phosphate
  modified_base 9: mod_base = OTHER; note = 2'-fluoroguanosine-3'-phosphate
  modified_base 10: mod_base = OTHER; note = 2'-fluoroadenosine-3'-phosphate
  modified_base 11: mod_base = OTHER; note = 2'-fluoroadenosine-3'-phosphate
  modified_base 12: mod_base = OTHER; note = 2'-O-methylguanosine-3'-phosphate
  modified_base 13: mod_base = OTHER; note = 2'-O-methyladenosine-3'-phosphate
  modified_base 14: mod_base = OTHER; note = 2'-O-methyluridine-3'-phosphate
  modified_base 15: mod_base = OTHER; note = 2'-O-methylguanosine-3'-phosphate
  modified_base 16: mod_base = OTHER; note = 2'-O-methylguanosine-3'-phosphate
  modified_base 17: mod_base = OTHER; note = 2'-O-methylguanosine-3'-phosphate
  modified_base 18: mod_base = OTHER; note = 2'-O-methylcytidine-3'-phosphate
  modified_base 19: mod_base = OTHER; note = 2'-O-methyluridine-3'-phosphate
  modified_base 20: mod_base = OTHER; note = 2'-O-methyladenosine-3'-phosphate
  modified_base 21: mod_base = OTHER; note = 2'-O-methylcytidine-3'-phosphate attached to N-[tris(N-acetylgalactosamine-alkyl)-amidodecanoyl)]-4-hydr oxyprolinol Hyp-(N-acetylgalactosamine-alkyl)3
caggcagagaagatgggctac

SEQ ID NO: 2985 - RNA, 23 nt, synthetic construct
  misc_feature 1..23: note = Description of Artificial Sequence: Synthetic oligonucleotide
  source 1..23: mol_type = other RNA
  modified_base 1: mod_base = OTHER; note = 2'-O-methylguanosine-3'- phosphorothioate
  modified_base 2: mod_base = OTHER; note = 2'-fluorouridine -3'-phosphorothioate
  modified_base 3: mod_base = OTHER; note = 2'-O-methyladenosine-3'-phosphate
  modified_base 4: mod_base = OTHER; note = 2'-O-methylguanosine-3'-phosphate
  modified_base 5: mod_base = OTHER; note = 2'-O-methylcytidine-3'-phosphate
  modified_base 6: mod_base = OTHER; note = 2'-fluorocytidine-3'-phosphate
  modified_base 7: mod_base = OTHER; note = 2'-O-methylcytidine-3'-phosphate
  modified_base 8: mod_base = OTHER; note = 2'-fluoroadenosine-3'-phosphate
  modified_base 9: mod_base = OTHER; note = 2'-fluorouridine-3'-phosphate
  modified_base 10: mod_base = OTHER; note = 2'-O-methylcytidine-3'-phosphate
  modified_base 11: mod_base = OTHER; note = 2'-O-methyluridine-3'-phosphate
  modified_base 12: mod_base = OTHER; note = 2'-O-methyluridine-3'-phosphate
  modified_base 13: mod_base = OTHER; note = 2'-O-methylcytidine-3'-phosphate
  modified_base 14: mod_base = OTHER; note = 2'-fluorouridine-3'-phosphate
  modified_base 15: mod_base = OTHER; note = 2'-O-methylcytidine-3'-phosphate
  modified_base 16: mod_base = OTHER; note = 2'-fluorouridine-3'-phosphate
  modified_base 17: mod_base = OTHER; note = 2'-O-methylguanosine-3'-phosphate
  modified_base 18: mod_base = OTHER; note = 2'-O-methylcytidine-3'-phosphate
  modified_base 19: mod_base = OTHER; note = 2'-O-methylcytidine-3'-phosphate
  modified_base 20: mod_base = OTHER; note = 2'-O-methyluridine-3'-phosphate
  modified_base 21: mod_base = OTHER; note = 2'-O-methylguanosine-3'- phosphorothioate
  modified_base 22: mod_base = OTHER; note = 2'-O-methylcytidine-3'- phosphorothioate
  modified_base 23: mod_base = OTHER; note = 2'-O-methylcytidine-3'-phosphate
gtagcccatcttctctgcctgcc

SEQ ID NO: 2986 - protein, 16 aa, unidentified
  REGION 1..16: note = Description of Unknown: RFGF peptide
AAVALLPAVLLALLAP

SEQ ID NO: 2987 - protein, 11 aa, unidentified
  REGION 1..11: note = Description of Unknown: RFGF analogue peptide
AALLPVLLAAP

SEQ ID NO: 2988 - protein, 13 aa, Human immunodeficiency virus
GRKKRRQRRRPPQ

SEQ ID NO: 2989 - protein, 16 aa, Drosophila sp.
RQIKIWFQNRRMKWKK

SEQ ID NO: 2990 - RNA, 21 nt, synthetic construct
  misc_feature 1..21: note = Description of Artificial Sequence: Synthetic oligonucleotide
  source 1..21: mol_type = other RNA
aacaccaaaaattgtctccaa

SEQ ID NO: 2991 - RNA, 21 nt, synthetic construct
  misc_feature 1..21: note = Description of Artificial Sequence: Synthetic oligonucleotide
  source 1..21: mol_type = other RNA
aaaccgagtaattggaagtga

SEQ ID NO: 2992 - RNA, 21 nt, synthetic construct
  misc_feature 1..21: note = Description of Artificial Sequence: Synthetic oligonucleotide
  source 1..21: mol_type = other RNA
aaatcagtggctttcccaaaa

SEQ ID NO: 2993 - RNA, 21 nt, synthetic construct
  misc_feature 1..21: note = Description of Artificial Sequence: Synthetic oligonucleotide
  source 1..21: mol_type = other RNA
tcccaacattgtcaagtacaa

SEQ ID NO: 2994 - RNA, 21 nt, synthetic construct
  misc_feature 1..21: note = Description of Artificial Sequence: Synthetic oligonucleotide
  source 1..21: mol_type = other RNA
tgtgccatcagtatcttaata

SEQ ID NO: 2995 - RNA, 21 nt, synthetic construct
  misc_feature 1..21: note = Description of Artificial Sequence: Synthetic oligonucleotide
  source 1..21: mol_type = other RNA
aaattgtctccagcaaagact

SEQ ID NO: 2996 - RNA, 21 nt, synthetic construct
  misc_feature 1..21: note = Description of Artificial Sequence: Synthetic oligonucleotide
  source 1..21: mol_type = other RNA
accttgaacagtgaaaaaaaa

SEQ ID NO: 2997 - RNA, 21 nt, synthetic construct
  misc_feature 1..21: note = Description of Artificial Sequence: Synthetic oligonucleotide
  source 1..21: mol_type = other RNA
aaaacaccaaaaattgtctca

SEQ ID NO: 2998 - RNA, 21 nt, synthetic construct
  misc_feature 1..21: note = Description of Artificial Sequence: Synthetic oligonucleotide
  source 1..21: mol_type = other RNA
accaaaaattgtctccagcaa

SEQ ID NO: 2999 - RNA, 21 nt, synthetic construct
  misc_feature 1..21: note = Description of Artificial Sequence: Synthetic oligonucleotide
  source 1..21: mol_type = other RNA
caagttcatcattcccaacat

SEQ ID NO: 3000 - RNA, 21 nt, synthetic construct
  misc_feature 1..21: note = Description of Artificial Sequence: Synthetic oligonucleotide
  source 1..21: mol_type = other RNA
gcaatattatgtgagatgtaa

SEQ ID NO: 3001 - RNA, 21 nt, synthetic construct
  misc_feature 1..21: note = Description of Artificial Sequence: Synthetic oligonucleotide
  source 1..21: mol_type = other RNA
gtctcaaaagattcaaagtca

SEQ ID NO: 3002 - RNA, 21 nt, synthetic construct
  misc_feature 1..21: note = Description of Artificial Sequence: Synthetic oligonucleotide
  source 1..21: mol_type = other RNA
cattcccaacattgtcaagta

SEQ ID NO: 3003 - RNA, 21 nt, synthetic construct
  misc_feature 1..21: note = Description of Artificial Sequence: Synthetic oligonucleotide
  source 1..21: mol_type = other RNA
aaaccttgaacagtgaaaaaa

SEQ ID NO: 3004 - RNA, 21 nt, synthetic construct
  misc_feature 1..21: note = Description of Artificial Sequence: Synthetic oligonucleotide
  source 1..21: mol_type = other RNA
tcaaaagattcaaagtccaaa

SEQ ID NO: 3005 - RNA, 21 nt, synthetic construct
  misc_feature 1..21: note = Description of Artificial Sequence: Synthetic oligonucleotide
  source 1..21: mol_type = other RNA
acatcttcaagttcatcatta

SEQ ID NO: 3006 - RNA, 21 nt, synthetic construct
  misc_feature 1..21: note = Description of Artificial Sequence: Synthetic oligonucleotide
  source 1..21: mol_type = other RNA
cagctgattgtgaatcttctt

SEQ ID NO: 3007 - RNA, 21 nt, synthetic construct
  misc_feature 1..21: note = Description of Artificial Sequence: Synthetic oligonucleotide
  source 1..21: mol_type = other RNA
ctcaaaagattcaaagtccaa

SEQ ID NO: 3008 - RNA, 21 nt, synthetic construct
  misc_feature 1..21: note = Description of Artificial Sequence: Synthetic oligonucleotide
  source 1..21: mol_type = other RNA
aaaaccgagtaattggaagta

SEQ ID NO: 3009 - RNA, 21 nt, synthetic construct
  misc_feature 1..21: note = Description of Artificial Sequence: Synthetic oligonucleotide
  source 1..21: mol_type = other RNA
tgatgcatatcttgtgcataa

SEQ ID NO: 3010 - RNA, 21 nt, synthetic construct
  misc_feature 1..21: note = Description of Artificial Sequence: Synthetic oligonucleotide
  source 1..21: mol_type = other RNA
ccatcagtatcttaatgaaga

SEQ ID NO: 3011 - RNA, 21 nt, synthetic construct
  misc_feature 1..21: note = Description of Artificial Sequence: Synthetic oligonucleotide
  source 1..21: mol_type = other RNA
aatcagtggctttcccaaaaa

SEQ ID NO: 3012 - RNA, 21 nt, synthetic construct
  misc_feature 1..21: note = Description of Artificial Sequence: Synthetic oligonucleotide
  source 1..21: mol_type = other RNA
ttaaaacaccaaaaattgtct

SEQ ID NO: 3013 - RNA, 21 nt, synthetic construct
  misc_feature 1..21: note = Description of Artificial Sequence: Synthetic oligonucleotide
  source 1..21: mol_type = other RNA
ctgattgtgaatcttcttaaa

SEQ ID NO: 3014 - RNA, 21 nt, synthetic construct
  misc_feature 1..21: note = Description of Artificial Sequence: Synthetic oligonucleotide
  source 1..21: mol_type = other RNA
ataaaaccttgaacagtgaaa

SEQ ID NO: 3015 - RNA, 21 nt, synthetic construct
  misc_feature 1..21: note = Description of Artificial Sequence: Synthetic oligonucleotide
  source 1..21: mol_type = other RNA
agtgtcatgccaaataaaaca

SEQ ID NO: 3016 - RNA, 21 nt, synthetic construct
  misc_feature 1..21: note = Description of Artificial Sequence: Synthetic oligonucleotide
  source 1..21: mol_type = other RNA
acaccaaaaattgtctccaga

SEQ ID NO: 3017 - RNA, 21 nt, synthetic construct
  misc_feature 1..21: note = Description of Artificial Sequence: Synthetic oligonucleotide
  source 1..21: mol_type = other RNA
gcattgcaatattatgtgaga

SEQ ID NO: 3018 - RNA, 21 nt, synthetic construct
  misc_feature 1..21: note = Description of Artificial Sequence: Synthetic oligonucleotide
  source 1..21: mol_type = other RNA
gtcatgccaaataaaacctta

SEQ ID NO: 3019 - RNA, 21 nt, synthetic construct
  misc_feature 1..21: note = Description of Artificial Sequence: Synthetic oligonucleotide
  source 1..21: mol_type = other RNA
atatcttgtgcataaatgtta

SEQ ID NO: 3020 - RNA, 21 nt, synthetic construct
  misc_feature 1..21: note = Description of Artificial Sequence: Synthetic oligonucleotide
  source 1..21: mol_type = other RNA
aaacaccaaaaattgtctcca

SEQ ID NO: 3021 - RNA, 21 nt, synthetic construct
  misc_feature 1..21: note = Description of Artificial Sequence: Synthetic oligonucleotide
  source 1..21: mol_type = other RNA
taacctggctccagtgtgtaa

SEQ ID NO: 3022 - RNA, 21 nt, synthetic construct
  misc_feature 1..21: note = Description of Artificial Sequence: Synthetic oligonucleotide
  source 1..21: mol_type = other RNA
tgcatatcttgtgcataaata

SEQ ID NO: 3023 - RNA, 21 nt, synthetic construct
  misc_feature 1..21: note = Description of Artificial Sequence: Synthetic oligonucleotide
  source 1..21: mol_type = other RNA
acattgtcaagtacagtccaa

SEQ ID NO: 3024 - RNA, 21 nt, synthetic construct
  misc_feature 1..21: note = Description of Artificial Sequence: Synthetic oligonucleotide
  source 1..21: mol_type = other RNA
aaccttgaacagtgaaaaaaa

SEQ ID NO: 3025 - RNA, 21 nt, synthetic construct
  misc_feature 1..21: note = Description of Artificial Sequence: Synthetic oligonucleotide
  source 1..21: mol_type = other RNA
gtgtgcattgcaatattatgt

SEQ ID NO: 3026 - RNA, 21 nt, synthetic construct
  misc_feature 1..21: note = Description of Artificial Sequence: Synthetic oligonucleotide
  source 1..21: mol_type = other RNA
ccaaaaaccgagtaattggaa

SEQ ID NO: 3027 - RNA, 21 nt, synthetic construct
  misc_feature 1..21: note = Description of Artificial Sequence: Synthetic oligonucleotide
  source 1..21: mol_type = other RNA
caaaaaccgagtaattggaaa

SEQ ID NO: 3028 - RNA, 21 nt, synthetic construct
  misc_feature 1..21: note = Description of Artificial Sequence: Synthetic oligonucleotide
  source 1..21: mol_type = other RNA
ccaagtggtacttgtgtagta

SEQ ID NO: 3029 - RNA, 21 nt, synthetic construct
  misc_feature 1..21: note = Description of Artificial Sequence: Synthetic oligonucleotide
  source 1..21: mol_type = other RNA
cagcgaaacgtgaacatctta

SEQ ID NO: 3030 - RNA, 21 nt, synthetic construct
  misc_feature 1..21: note = Description of Artificial Sequence: Synthetic oligonucleotide
  source 1..21: mol_type = other RNA
tgattgtgaatcttcttaaga

SEQ ID NO: 3031 - RNA, 21 nt, synthetic construct
  misc_feature 1..21: note = Description of Artificial Sequence: Synthetic oligonucleotide
  source 1..21: mol_type = other RNA
cttcaagttcatcattcccaa

SEQ ID NO: 3032 - RNA, 21 nt, synthetic construct
  misc_feature 1..21: note = Description of Artificial Sequence: Synthetic oligonucleotide
  source 1..21: mol_type = other RNA
ggaccagctgattgtgaatct

SEQ ID NO: 3033 - RNA, 21 nt, synthetic construct
  misc_feature 1..21: note = Description of Artificial Sequence: Synthetic oligonucleotide
  source 1..21: mol_type = other RNA
atgccaaataaaaccttgaaa

SEQ ID NO: 3034 - RNA, 23 nt, synthetic construct
  misc_feature 1..23: note = Description of Artificial Sequence: Synthetic oligonucleotide
  source 1..23: mol_type = other RNA
ttggagacaatttttggtgtttt

SEQ ID NO: 3035 - RNA, 23 nt, synthetic construct
  misc_feature 1..23: note = Description of Artificial Sequence: Synthetic oligonucleotide
  source 1..23: mol_type = other RNA
tcacttccaattactcggttttt

SEQ ID NO: 3036 - RNA, 23 nt, synthetic construct
  misc_feature 1..23: note = Description of Artificial Sequence: Synthetic oligonucleotide
  source 1..23: mol_type = other RNA
ttttgggaaagccactgattttc

SEQ ID NO: 3037 - RNA, 23 nt, synthetic construct
  misc_feature 1..23: note = Description of Artificial Sequence: Synthetic oligonucleotide
  source 1..23: mol_type = other RNA
ttgtacttgacaatgttgggaat

SEQ ID NO: 3038 - RNA, 23 nt, synthetic construct
  misc_feature 1..23: note = Description of Artificial Sequence: Synthetic oligonucleotide
  source 1..23: mol_type = other RNA
tattaagatactgatggcacaag

SEQ ID NO: 3039 - RNA, 23 nt, synthetic construct
  misc_feature 1..23: note = Description of Artificial Sequence: Synthetic oligonucleotide
  source 1..23: mol_type = other RNA
agtctttgctggagacaattttt

SEQ ID NO: 3040 - RNA, 23 nt, synthetic construct
  misc_feature 1..23: note = Description of Artificial Sequence: Synthetic oligonucleotide
  source 1..23: mol_type = other RNA
ttttttttcactgttcaaggttt

SEQ ID NO: 3041 - RNA, 23 nt, synthetic construct
  misc_feature 1..23: note = Description of Artificial Sequence: Synthetic oligonucleotide
  source 1..23: mol_type = other RNA
tgagacaatttttggtgttttaa

SEQ ID NO: 3042 - RNA, 23 nt, synthetic construct
  misc_feature 1..23: note = Description of Artificial Sequence: Synthetic oligonucleotide
  source 1..23: mol_type = other RNA
ttgctggagacaatttttggtgt

SEQ ID NO: 3043 - RNA, 23 nt, synthetic construct
  misc_feature 1..23: note = Description of Artificial Sequence: Synthetic oligonucleotide
  source 1..23: mol_type = other RNA
atgttgggaatgatgaacttgaa

SEQ ID NO: 3044 - RNA, 23 nt, synthetic construct
  misc_feature 1..23: note = Description of Artificial Sequence: Synthetic oligonucleotide
  source 1..23: mol_type = other RNA
ttacatctcacataatattgcaa

SEQ ID NO: 3045 - RNA, 23 nt, synthetic construct
  misc_feature 1..23: note = Description of Artificial Sequence: Synthetic oligonucleotide
  source 1..23: mol_type = other RNA
tgactttgaatcttttgagaccg

SEQ ID NO: 3046 - RNA, 23 nt, synthetic construct
  misc_feature 1..23: note = Description of Artificial Sequence: Synthetic oligonucleotide
  source 1..23: mol_type = other RNA
tacttgacaatgttgggaatgat

SEQ ID NO: 3047 - RNA, 23 nt, synthetic construct
  misc_feature 1..23: note = Description of Artificial Sequence: Synthetic oligonucleotide
  source 1..23: mol_type = other RNA
ttttttcactgttcaaggtttta

SEQ ID NO: 3048 - RNA, 23 nt, synthetic construct
  misc_feature 1..23: note = Description of Artificial Sequence: Synthetic oligonucleotide
  source 1..23: mol_type = other RNA
tttggactttgaatcttttgaga

SEQ ID NO: 3049 - RNA, 23 nt, synthetic construct
  misc_feature 1..23: note = Description of Artificial Sequence: Synthetic oligonucleotide
  source 1..23: mol_type = other RNA
taatgatgaacttgaagatgttc

SEQ ID NO: 3050 - RNA, 23 nt, synthetic construct
  misc_feature 1..23: note = Description of Artificial Sequence: Synthetic oligonucleotide
  source 1..23: mol_type = other RNA
aagaagattcacaatcagctggt

SEQ ID NO: 3051 - RNA, 23 nt, synthetic construct
  misc_feature 1..23: note = Description of Artificial Sequence: Synthetic oligonucleotide
  source 1..23: mol_type = other RNA
ttggactttgaatcttttgagac

SEQ ID NO: 3052 - RNA, 23 nt, synthetic construct
  misc_feature 1..23: note = Description of Artificial Sequence: Synthetic oligonucleotide
  source 1..23: mol_type = other RNA
tacttccaattactcggtttttg

SEQ ID NO: 3053 - RNA, 23 nt, synthetic construct
  misc_feature 1..23: note = Description of Artificial Sequence: Synthetic oligonucleotide
  source 1..23: mol_type = other RNA
ttatgcacaagatatgcatcatg

SEQ ID NO: 3054 - RNA, 23 nt, synthetic construct
  misc_feature 1..23: note = Description of Artificial Sequence: Synthetic oligonucleotide
  source 1..23: mol_type = other RNA
tcttcattaagatactgatggca

SEQ ID NO: 3055 - RNA, 23 nt, synthetic construct
  misc_feature 1..23: note = Description of Artificial Sequence: Synthetic oligonucleotide
  source 1..23: mol_type = other RNA
tttttgggaaagccactgatttt

SEQ ID NO: 3056 - RNA, 23 nt, synthetic construct
  misc_feature 1..23: note = Description of Artificial Sequence: Synthetic oligonucleotide
  source 1..23: mol_type = other RNA
agacaatttttggtgttttaagg

SEQ ID NO: 3057 - RNA, 23 nt, synthetic construct
  misc_feature 1..23: note = Description of Artificial Sequence: Synthetic oligonucleotide
  source 1..23: mol_type = other RNA
tttaagaagattcacaatcagct

SEQ ID NO: 3058 - RNA, 23 nt, synthetic construct
  misc_feature 1..23: note = Description of Artificial Sequence: Synthetic oligonucleotide
  source 1..23: mol_type = other RNA
tttcactgttcaaggttttattt

SEQ ID NO: 3059 - RNA, 23 nt, synthetic construct
  misc_feature 1..23: note = Description of Artificial Sequence: Synthetic oligonucleotide
  source 1..23: mol_type = other RNA
tgttttatttggcatgacacttg

SEQ ID NO: 3060 - RNA, 23 nt, synthetic construct
  misc_feature 1..23: note = Description of Artificial Sequence: Synthetic oligonucleotide
  source 1..23: mol_type = other RNA
tctggagacaatttttggtgttt

SEQ ID NO: 3061 - RNA, 23 nt, synthetic construct
  misc_feature 1..23: note = Description of Artificial Sequence: Synthetic oligonucleotide
  source 1..23: mol_type = other RNA
tctcacataatattgcaatgcac

SEQ ID NO: 3062 - RNA, 23 nt, synthetic construct
  misc_feature 1..23: note = Description of Artificial Sequence: Synthetic oligonucleotide
  source 1..23: mol_type = other RNA
taaggttttatttggcatgacac

SEQ ID NO: 3063 - RNA, 23 nt, synthetic construct
  misc_feature 1..23: note = Description of Artificial Sequence: Synthetic oligonucleotide
  source 1..23: mol_type = other RNA
taacatttatgcacaagatatgc

SEQ ID NO: 3064 - RNA, 23 nt, synthetic construct
  misc_feature 1..23: note = Description of Artificial Sequence: Synthetic oligonucleotide
  source 1..23: mol_type = other RNA
tggagacaatttttggtgtttta

SEQ ID NO: 3065 - RNA, 23 nt, synthetic construct
  misc_feature 1..23: note = Description of Artificial Sequence: Synthetic oligonucleotide
  source 1..23: mol_type = other RNA
ttacacactggagccaggttata

SEQ ID NO: 3066 - RNA, 23 nt, synthetic construct
  misc_feature 1..23: note = Description of Artificial Sequence: Synthetic oligonucleotide
  source 1..23: mol_type = other RNA
tatttatgcacaagatatgcatc

SEQ ID NO: 3067 - RNA, 23 nt, synthetic construct
  misc_feature 1..23: note = Description of Artificial Sequence: Synthetic oligonucleotide
  source 1..23: mol_type = other RNA
ttggactgtacttgacaatgttg

SEQ ID NO: 3068 - RNA, 23 nt, synthetic construct
  misc_feature 1..23: note = Description of Artificial Sequence: Synthetic oligonucleotide
  source 1..23: mol_type = other RNA
tttttttcactgttcaaggtttt

SEQ ID NO: 3069 - RNA, 23 nt, synthetic construct
  misc_feature 1..23: note = Description of Artificial Sequence: Synthetic oligonucleotide
  source 1..23: mol_type = other RNA
acataatattgcaatgcacacta

SEQ ID NO: 3070 - RNA, 23 nt, synthetic construct
  misc_feature 1..23: note = Description of Artificial Sequence: Synthetic oligonucleotide
  source 1..23: mol_type = other RNA
ttccaattactcggtttttggga

SEQ ID NO: 3071 - RNA, 23 nt, synthetic construct
  misc_feature 1..23: note = Description of Artificial Sequence: Synthetic oligonucleotide
  source 1..23: mol_type = other RNA
tttccaattactcggtttttggg

SEQ ID NO: 3072 - RNA, 23 nt, synthetic construct
  misc_feature 1..23: note = Description of Artificial Sequence: Synthetic oligonucleotide
  source 1..23: mol_type = other RNA
tactacacaagtaccacttggca

SEQ ID NO: 3073 - RNA, 23 nt, synthetic construct
  misc_feature 1..23: note = Description of Artificial Sequence: Synthetic oligonucleotide
  source 1..23: mol_type = other RNA
taagatgttcacgtttcgctgga

SEQ ID NO: 3074 - RNA, 23 nt, synthetic construct
  misc_feature 1..23: note = Description of Artificial Sequence: Synthetic oligonucleotide
  source 1..23: mol_type = other RNA
tcttaagaagattcacaatcagc

SEQ ID NO: 3075 - RNA, 23 nt, synthetic construct
  misc_feature 1..23: note = Description of Artificial Sequence: Synthetic oligonucleotide
  source 1..23: mol_type = other RNA
ttgggaatgatgaacttgaagat

SEQ ID NO: 3076 - RNA, 23 nt, synthetic construct
  misc_feature 1..23: note = Description of Artificial Sequence: Synthetic oligonucleotide
  source 1..23: mol_type = other RNA
agattcacaatcagctggtcctt

SEQ ID NO: 3077 - RNA, 23 nt, synthetic construct
  misc_feature 1..23: note = Description of Artificial Sequence: Synthetic oligonucleotide
  source 1..23: mol_type = other RNA
tttcaaggttttatttggcatga

SEQ ID NO: 3078 - RNA, 21 nt, synthetic construct
  misc_feature 1..21: note = Description of Artificial Sequence: Synthetic oligonucleotide
  source 1..21: mol_type = other RNA
  modified_base 1: mod_base = OTHER; note = 2'-O-methyladenosine-3'- phosphorothioate
  modified_base 2: mod_base = OTHER; note = 2'-O-methyladenosine-3'- phosphorothioate
  modified_base 3: mod_base = OTHER; note = 2'-O-methylcytidine-3'-phosphate
  modified_base 4: mod_base = OTHER; note = 2'-O-methyladenosine-3'-phosphate
  modified_base 5: mod_base = OTHER; note = 2'-O-methylcytidine-3'-phosphate
  modified_base 6: mod_base = OTHER; note = 2'-O-methylcytidine-3'-phosphate
  modified_base 7: mod_base = OTHER; note = 2'-fluoroadenosine-3'-phosphate
  modified_base 8: mod_base = OTHER; note = 2'-O-methyladenosine-3'-phosphate
  modified_base 9: mod_base = OTHER; note = 2'-fluoroadenosine-3'-phosphate
  modified_base 10: mod_base = OTHER; note = 2'-fluoroadenosine-3'-phosphate
  modified_base 11: mod_base = OTHER; note = 2'-fluoroadenosine-3'-phosphate
  modified_base 12: mod_base = OTHER; note = 2'-O-methyluridine-3'-phosphate
  modified_base 13: mod_base = OTHER; note = 2'-O-methyluridine-3'-phosphate
  modified_base 14: mod_base = OTHER; note = 2'-O-methylguanosine-3'-phosphate
  modified_base 15: mod_base = OTHER; note = 2'-O-methyluridine-3'-phosphate
  modified_base 16: mod_base = OTHER; note = 2'-O-methylcytidine-3'-phosphate
  modified_base 17: mod_base = OTHER; note = 2'-O-methyluridine-3'-phosphate
  modified_base 18: mod_base = OTHER; note = 2'-O-methylcytidine-3'-phosphate
  modified_base 19: mod_base = OTHER; note = 2'-O-methylcytidine-3'-phosphate
  modified_base 20: mod_base = OTHER; note = 2'-O-methyladenosine-3'-phosphate
  modified_base 21: mod_base = OTHER; note = 2'-O-methyladenosine-3'-phosphate attached to N-[tris(N-acetylgalactosamine-alkyl)-amidodecanoyl)]-4-hydr oxyprolinol Hyp-(N-acetylgalactosamine-alkyl)3
aacaccaaaaattgtctccaa

SEQ ID NO: 3079 - RNA, 21 nt, synthetic construct
  misc_feature 1..21: note = Description of Artificial Sequence: Synthetic oligonucleotide
  source 1..21: mol_type = other RNA
  modified_base 1: mod_base = OTHER; note = 2'-O-methyladenosine-3'- phosphorothioate
  modified_base 2: mod_base = OTHER; note = 2'-O-methyladenosine-3'- phosphorothioate
  modified_base 3: mod_base = OTHER; note = 2'-O-methyladenosine-3'-phosphate
  modified_base 4: mod_base = OTHER; note = 2'-O-methylcytidine-3'-phosphate
  modified_base 5: mod_base = OTHER; note = 2'-O-methylcytidine-3'-phosphate
  modified_base 6: mod_base = OTHER; note = 2'-O-methylguanosine-3'-phosphate
  modified_base 7: mod_base = OTHER; note = 2'-fluoroadenosine-3'-phosphate
  modified_base 8: mod_base = OTHER; note = 2'-O-methylguanosine-3'-phosphate
  modified_base 9: mod_base = OTHER; note = 2'-fluorouridine-3'-phosphate
  modified_base 10: mod_base = OTHER; note = 2'-fluoroadenosine-3'-phosphate
  modified_base 11: mod_base = OTHER; note = 2'-fluoroadenosine-3'-phosphate
  modified_base 12: mod_base = OTHER; note = 2'-O-methyluridine-3'-phosphate
  modified_base 13: mod_base = OTHER; note = 2'-O-methyluridine-3'-phosphate
  modified_base 14: mod_base = OTHER; note = 2'-O-methylguanosine-3'-phosphate
  modified_base 15: mod_base = OTHER; note = 2'-O-methylguanosine-3'-phosphate
  modified_base 16: mod_base = OTHER; note = 2'-O-methyladenosine-3'-phosphate
  modified_base 17: mod_base = OTHER; note = 2'-O-methyladenosine-3'-phosphate
  modified_base 18: mod_base = OTHER; note = 2'-O-methylguanosine-3'-phosphate
  modified_base 19: mod_base = OTHER; note = 2'-O-methyluridine-3'-phosphate
  modified_base 20: mod_base = OTHER; note = 2'-O-methylguanosine-3'-phosphate
  modified_base 21: mod_base = OTHER; note = 2'-O-methyladenosine-3'-phosphate attached to N-[tris(N-acetylgalactosamine-alkyl)-amidodecanoyl)]-4-hydr oxyprolinol Hyp-(N-acetylgalactosamine-alkyl)3
aaaccgagtaattggaagtga

SEQ ID NO: 3080 - RNA, 21 nt, synthetic construct
  misc_feature 1..21: note = Description of Artificial Sequence: Synthetic oligonucleotide
  source 1..21: mol_type = other RNA
  modified_base 1: mod_base = OTHER; note = 2'-O-methyladenosine-3'- phosphorothioate
  modified_base 2: mod_base = OTHER; note = 2'-O-methyladenosine-3'- phosphorothioate
  modified_base 3: mod_base = OTHER; note = 2'-O-methyladenosine-3'-phosphate
  modified_base 4: mod_base = OTHER; note = 2'-O-methyluridine-3'-phosphate
  modified_base 5: mod_base = OTHER; note = 2'-O-methylcytidine-3'-phosphate
  modified_base 6: mod_base = OTHER; note = 2'-O-methyladenosine-3'-phosphate
  modified_base 7: mod_base = OTHER; note = 2'-fluoroguanosine-3'-phosphate
  modified_base 8: mod_base = OTHER; note = 2'-O-methyluridine-3'-phosphate
  modified_base 9: mod_base = OTHER; note = 2'-fluoroguanosine-3'-phosphate
  modified_base 10: mod_base = OTHER; note = 2'-fluoroguanosine-3'-phosphate
  modified_base 11: mod_base = OTHER; note = 2'-fluorocytidine-3'-phosphate
  modified_base 12: mod_base = OTHER; note = 2'-O-methyluridine-3'-phosphate
  modified_base 13: mod_base = OTHER; note = 2'-O-methyluridine-3'-phosphate
  modified_base 14: mod_base = OTHER; note = 2'-O-methyluridine-3'-phosphate
  modified_base 15: mod_base = OTHER; note = 2'-O-methylcytidine-3'-phosphate
  modified_base 16: mod_base = OTHER; note = 2'-O-methylcytidine-3'-phosphate
  modified_base 17: mod_base = OTHER; note = 2'-O-methylcytidine-3'-phosphate
  modified_base 18: mod_base = OTHER; note = 2'-O-methyladenosine-3'-phosphate
  modified_base 19: mod_base = OTHER; note = 2'-O-methyladenosine-3'-phosphate
  modified_base 20: mod_base = OTHER; note = 2'-O-methyladenosine-3'-phosphate
  modified_base 21: mod_base = OTHER; note = 2'-O-methyladenosine-3'-phosphate attached to N-[tris(N-acetylgalactosamine-alkyl)-amidodecanoyl)]-4-hydr oxyprolinol Hyp-(N-acetylgalactosamine-alkyl)3
aaatcagtggctttcccaaaa

SEQ ID NO: 3081 - RNA, 21 nt, synthetic construct
  misc_feature 1..21: note = Description of Artificial Sequence: Synthetic oligonucleotide
  source 1..21: mol_type = other RNA
  modified_base 1: mod_base = OTHER; note = 2'-O-methyluridine-3'-phosphorothioate
  modified_base 2: mod_base = OTHER; note = 2'-O-methylcytidine-3'- phosphorothioate
  modified_base 3: mod_base = OTHER; note = 2'-O-methylcytidine-3'-phosphate
  modified_base 4: mod_base = OTHER; note = 2'-O-methylcytidine-3'-phosphate
  modified_base 5: mod_base = OTHER; note = 2'-O-methyladenosine-3'-phosphate
  modified_base 6: mod_base = OTHER; note = 2'-O-methyladenosine-3'-phosphate
  modified_base 7: mod_base = OTHER; note = 2'-fluorocytidine-3'-phosphate
  modified_base 8: mod_base = OTHER; note = 2'-O-methyladenosine-3'-phosphate
  modified_base 9: mod_base = OTHER; note = 2'-fluorouridine-3'-phosphate
  modified_base 10: mod_base = OTHER; note = 2'-fluorouridine-3'-phosphate
  modified_base 11: mod_base = OTHER; note = 2'-fluoroguanosine-3'-phosphate
  modified_base 12: mod_base = OTHER; note = 2'-O-methyluridine-3'-phosphate
  modified_base 13: mod_base = OTHER; note = 2'-O-methylcytidine-3'-phosphate
  modified_base 14: mod_base = OTHER; note = 2'-O-methyladenosine-3'-phosphate
  modified_base 15: mod_base = OTHER; note = 2'-O-methyladenosine-3'-phosphate
  modified_base 16: mod_base = OTHER; note = 2'-O-methylguanosine-3'-phosphate
  modified_base 17: mod_base = OTHER; note = 2'-O-methyluridine-3'-phosphate
  modified_base 18: mod_base = OTHER; note = 2'-O-methyladenosine-3'-phosphate
  modified_base 19: mod_base = OTHER; note = 2'-O-methylcytidine-3'-phosphate
  modified_base 20: mod_base = OTHER; note = 2'-O-methyladenosine-3'-phosphate
  modified_base 21: mod_base = OTHER; note = 2'-O-methyladenosine-3'-phosphate attached to N-[tris(N-acetylgalactosamine-alkyl)-amidodecanoyl)]-4-hydr oxyprolinol Hyp-(N-acetylgalactosamine-alkyl)3
tcccaacattgtcaagtacaa

SEQ ID NO: 3082 - RNA, 21 nt, synthetic construct
  misc_feature 1..21: note = Description of Artificial Sequence: Synthetic oligonucleotide
  source 1..21: mol_type = other RNA
  modified_base 1: mod_base = OTHER; note = 2'-O-methyluridine-3'-phosphorothioate
  modified_base 2: mod_base = OTHER; note = 2'-O-methylguanosine-3'- phosphorothioate
  modified_base 3: mod_base = OTHER; note = 2'-O-methyluridine-3'-phosphate
  modified_base 4: mod_base = OTHER; note = 2'-O-methylguanosine-3'-phosphate
  modified_base 5: mod_base = OTHER; note = 2'-O-methylcytidine-3'-phosphate
  modified_base 6: mod_base = OTHER; note = 2'-O-methylcytidine-3'-phosphate
  modified_base 7: mod_base = OTHER; note = 2'-fluoroadenosine-3'-phosphate
  modified_base 8: mod_base = OTHER; note = 2'-O-methyluridine-3'-phosphate
  modified_base 9: mod_base = OTHER; note = 2'-fluorocytidine-3'-phosphate
  modified_base 10: mod_base = OTHER; note = 2'-fluoroadenosine-3'-phosphate
  modified_base 11: mod_base = OTHER; note = 2'-fluoroguanosine-3'-phosphate
  modified_base 12: mod_base = OTHER; note = 2'-O-methyluridine-3'-phosphate
  modified_base 13: mod_base = OTHER; note = 2'-O-methyladenosine-3'-phosphate
  modified_base 14: mod_base = OTHER; note = 2'-O-methyluridine-3'-phosphate
  modified_base 15: mod_base = OTHER; note = 2'-O-methylcytidine-3'-phosphate
  modified_base 16: mod_base = OTHER; note = 2'-O-methyluridine-3'-phosphate
  modified_base 17: mod_base = OTHER; note = 2'-O-methyluridine-3'-phosphate
  modified_base 18: mod_base = OTHER; note = 2'-O-methyladenosine-3'-phosphate
  modified_base 19: mod_base = OTHER; note = 2'-O-methyladenosine-3'-phosphate
  modified_base 20: mod_base = OTHER; note = 2'-O-methyluridine-3'-phosphate
  modified_base 21: mod_base = OTHER; note = 2'-O-methyladenosine-3'-phosphate attached to N-[tris(N-acetylgalactosamine-alkyl)-amidodecanoyl)]-4-hydr oxyprolinol Hyp-(N-acetylgalactosamine-alkyl)3
tgtgccatcagtatcttaata

SEQ ID NO: 3083 - RNA, 21 nt, synthetic construct
  misc_feature 1..21: note = Description of Artificial Sequence: Synthetic oligonucleotide
  source 1..21: mol_type = other RNA
  modified_base 1: mod_base = OTHER; note = 2'-O-methyladenosine-3'- phosphorothioate
  modified_base 2: mod_base = OTHER; note = 2'-O-methyladenosine-3'- phosphorothioate
  modified_base 3: mod_base = OTHER; note = 2'-O-methyladenosine-3'-phosphate
  modified_base 4: mod_base = OTHER; note = 2'-O-methyluridine-3'-phosphate
  modified_base 5: mod_base = OTHER; note = 2'-O-methyluridine-3'-phosphate
  modified_base 6: mod_base = OTHER; note = 2'-O-methylguanosine-3'-phosphate
  modified_base 7: mod_base = OTHER; note = 2'-fluorouridine-3'-phosphate
  modified_base 8: mod_base = OTHER; note = 2'-O-methylcytidine-3'-phosphate
  modified_base 9: mod_base = OTHER; note = 2'-fluorouridine-3'-phosphate
  modified_base 10: mod_base = OTHER; note = 2'-fluorocytidine-3'-phosphate
  modified_base 11: mod_base = OTHER; note = 2'-fluorocytidine-3'-phosphate
  modified_base 12: mod_base = OTHER; note = 2'-O-methyladenosine-3'-phosphate
  modified_base 13: mod_base = OTHER; note = 2'-O-methylguanosine-3'-phosphate
  modified_base 14: mod_base = OTHER; note = 2'-O-methylcytidine-3'-phosphate
  modified_base 15: mod_base = OTHER; note = 2'-O-methyladenosine-3'-phosphate
  modified_base 16: mod_base = OTHER; note = 2'-O-methyladenosine-3'-phosphate
  modified_base 17: mod_base = OTHER; note = 2'-O-methyladenosine-3'-phosphate
  modified_base 18: mod_base = OTHER; note = 2'-O-methylguanosine-3'-phosphate
  modified_base 19: mod_base = OTHER; note = 2'-O-methyladenosine-3'-phosphate
  modified_base 20: mod_base = OTHER; note = 2'-O-methylcytidine-3'-phosphate
  modified_base 21: mod_base = OTHER; note = 2'-O-methyluridine-3'-phosphate attached to N-[tris(N-acetylgalactosamine-alkyl)-amidodecanoyl)]-4-hydr oxyprolinol Hyp-(N-acetylgalactosamine-alkyl)3
aaattgtctccagcaaagact

SEQ ID NO: 3084 - RNA, 21 nt, synthetic construct
  misc_feature 1..21: note = Description of Artificial Sequence: Synthetic oligonucleotide
  source 1..21: mol_type = other RNA
  modified_base 1: mod_base = OTHER; note = 2'-O-methyladenosine-3'- phosphorothioate
  modified_base 2: mod_base = OTHER; note = 2'-O-methylcytidine-3'- phosphorothioate
  modified_base 3: mod_base = OTHER; note = 2'-O-methylcytidine-3'-phosphate
  modified_base 4: mod_base = OTHER; note = 2'-O-methyluridine-3'-phosphate
  modified_base 5: mod_base = OTHER; note = 2'-O-methyluridine-3'-phosphate
  modified_base 6: mod_base = OTHER; note = 2'-O-methylguanosine-3'-phosphate
  modified_base 7: mod_base = OTHER; note = 2'-fluoroadenosine-3'-phosphate
  modified_base 8: mod_base = OTHER; note = 2'-O-methyladenosine-3'-phosphate
  modified_base 9: mod_base = OTHER; note = 2'-fluorocytidine-3'-phosphate
  modified_base 10: mod_base = OTHER; note = 2'-fluoroadenosine-3'-phosphate
  modified_base 11: mod_base = OTHER; note = 2'-fluoroguanosine-3'-phosphate
  modified_base 12: mod_base = OTHER; note = 2'-O-methyluridine-3'-phosphate
  modified_base 13: mod_base = OTHER; note = 2'-O-methylguanosine-3'-phosphate
  modified_base 14: mod_base = OTHER; note = 2'-O-methyladenosine-3'-phosphate
  modified_base 15: mod_base = OTHER; note = 2'-O-methyladenosine-3'-phosphate
  modified_base 16: mod_base = OTHER; note = 2'-O-methyladenosine-3'-phosphate
  modified_base 17: mod_base = OTHER; note = 2'-O-methyladenosine-3'-phosphate
  modified_base 18: mod_base = OTHER; note = 2'-O-methyladenosine-3'-phosphate
  modified_base 19: mod_base = OTHER; note = 2'-O-methyladenosine-3'-phosphate
  modified_base 20: mod_base = OTHER; note = 2'-O-methyladenosine-3'-phosphate
  modified_base 21: mod_base = OTHER; note = 2'-O-methyladenosine-3'-phosphate attached to N-[tris(N-acetylgalactosamine-alkyl)-amidodecanoyl)]-4-hydr oxyprolinol Hyp-(N-acetylgalactosamine-alkyl)3
accttgaacagtgaaaaaaaa

SEQ ID NO: 3085 - RNA, 21 nt, synthetic construct
  misc_feature 1..21: note = Description of Artificial Sequence: Synthetic oligonucleotide
  source 1..21: mol_type = other RNA
  modified_base 1: mod_base = OTHER; note = 2'-O-methyladenosine-3'- phosphorothioate
  modified_base 2: mod_base = OTHER; note = 2'-O-methyladenosine-3'- phosphorothioate
  modified_base 3: mod_base = OTHER; note = 2'-O-methyladenosine-3'-phosphate
  modified_base 4: mod_base = OTHER; note = 2'-O-methyladenosine-3'-phosphate
  modified_base 5: mod_base = OTHER; note = 2'-O-methylcytidine-3'-phosphate
  modified_base 6: mod_base = OTHER; note = 2'-O-methyladenosine-3'-phosphate
  modified_base 7: mod_base = OTHER; note = 2'-fluorocytidine-3'-phosphate
  modified_base 8: mod_base = OTHER; note = 2'-O-methylcytidine-3'-phosphate
  modified_base 9: mod_base = OTHER; note = 2'-fluoroadenosine-3'-phosphate
  modified_base 10: mod_base = OTHER; note = 2'-fluoroadenosine-3'-phosphate
  modified_base 11: mod_base = OTHER; note = 2'-fluoroadenosine-3'-phosphate
  modified_base 12: mod_base = OTHER; note = 2'-O-methyladenosine-3'-phosphate
  modified_base 13: mod_base = OTHER; note = 2'-O-methyladenosine-3'-phosphate
  modified_base 14: mod_base = OTHER; note = 2'-O-methyluridine-3'-phosphate
  modified_base 15: mod_base = OTHER; note = 2'-O-methyluridine-3'-phosphate
  modified_base 16: mod_base = OTHER; note = 2'-O-methylguanosine-3'-phosphate
  modified_base 17: mod_base = OTHER; note = 2'-O-methyluridine-3'-phosphate
  modified_base 18: mod_base = OTHER; note = 2'-O-methylcytidine-3'-phosphate
  modified_base 19: mod_base = OTHER; note = 2'-O-methyluridine-3'-phosphate
  modified_base 20: mod_base = OTHER; note = 2'-O-methylcytidine-3'-phosphate
  modified_base 21: mod_base = OTHER; note = 2'-O-methyladenosine-3'-phosphate attached to N-[tris(N-acetylgalactosamine-alkyl)-amidodecanoyl)]-4-hydr oxyprolinol Hyp-(N-acetylgalactosamine-alkyl)3
aaaacaccaaaaattgtctca

SEQ ID NO: 3086 - RNA, 21 nt, synthetic construct
  misc_feature 1..21: note = Description of Artificial Sequence: Synthetic oligonucleotide
  source 1..21: mol_type = other RNA
  modified_base 1: mod_base = OTHER; note = 2'-O-methyladenosine-3'- phosphorothioate
  modified_base 2: mod_base = OTHER; note = 2'-O-methylcytidine-3'- phosphorothioate
  modified_base 3: mod_base = OTHER; note = 2'-O-methylcytidine-3'-phosphate
  modified_base 4: mod_base = OTHER; note = 2'-O-methyladenosine-3'-phosphate
  modified_base 5: mod_base = OTHER; note = 2'-O-methyladenosine-3'-phosphate
  modified_base 6: mod_base = OTHER; note = 2'-O-methyladenosine-3'-phosphate
  modified_base 7: mod_base = OTHER; note = 2'-fluoroadenosine-3'-phosphate
  modified_base 8: mod_base = OTHER; note = 2'-O-methyladenosine-3'-phosphate
  modified_base 9: mod_base = OTHER; note = 2'-fluorouridine-3'-phosphate
  modified_base 10: mod_base = OTHER; note = 2'-fluorouridine-3'-phosphate
  modified_base 11: mod_base = OTHER; note = 2'-fluoroguanosine-3'-phosphate
  modified_base 12: mod_base = OTHER; note = 2'-O-methyluridine-3'-phosphate
  modified_base 13: mod_base = OTHER; note = 2'-O-methylcytidine-3'-phosphate
  modified_base 14: mod_base = OTHER; note = 2'-O-methyluridine-3'-phosphate
  modified_base 15: mod_base = OTHER; note = 2'-O-methylcytidine-3'-phosphate
  modified_base 16: mod_base = OTHER; note = 2'-O-methylcytidine-3'-phosphate
  modified_base 17: mod_base = OTHER; note = 2'-O-methyladenosine-3'-phosphate
  modified_base 18: mod_base = OTHER; note = 2'-O-methylguanosine-3'-phosphate
  modified_base 19: mod_base = OTHER; note = 2'-O-methylcytidine-3'-phosphate
  modified_base 20: mod_base = OTHER; note = 2'-O-methyladenosine-3'-phosphate
  modified_base 21: mod_base = OTHER; note = 2'-O-methyladenosine-3'-phosphate attached to N-[tris(N-acetylgalactosamine-alkyl)-amidodecanoyl)]-4-hydr oxyprolinol Hyp-(N-acetylgalactosamine-alkyl)3
accaaaaattgtctccagcaa

SEQ ID NO: 3087 - RNA, 21 nt, synthetic construct
  misc_feature 1..21: note = Description of Artificial Sequence: Synthetic oligonucleotide
  source 1..21: mol_type = other RNA
  modified_base 1: mod_base = OTHER; note = 2'-O-methylcytidine-3'- phosphorothioate
  modified_base 2: mod_base = OTHER; note = 2'-O-methyladenosine-3'- phosphorothioate
  modified_base 3: mod_base = OTHER; note = 2'-O-methyladenosine-3'-phosphate
  modified_base 4: mod_base = OTHER; note = 2'-O-methylguanosine-3'-phosphate
  modified_base 5: mod_base = OTHER; note = 2'-O-methyluridine-3'-phosphate
  modified_base 6: mod_base = OTHER; note = 2'-O-methyluridine-3'-phosphate
  modified_base 7: mod_base = OTHER; note = 2'-fluorocytidine-3'-phosphate
  modified_base 8: mod_base = OTHER; note = 2'-O-methyladenosine-3'-phosphate
  modified_base 9: mod_base = OTHER; note = 2'-fluorouridine-3'-phosphate
  modified_base 10: mod_base = OTHER; note = 2'-fluorocytidine-3'-phosphate
  modified_base 11: mod_base = OTHER; note = 2'-fluoroadenosine-3'-phosphate
  modified_base 12: mod_base = OTHER; note = 2'-O-methyluridine-3'-phosphate
  modified_base 13: mod_base = OTHER; note = 2'-O-methyluridine-3'-phosphate
  modified_base 14: mod_base = OTHER; note = 2'-O-methylcytidine-3'-phosphate
  modified_base 15: mod_base = OTHER; note = 2'-O-methylcytidine-3'-phosphate
  modified_base 16: mod_base = OTHER; note = 2'-O-methylcytidine-3'-phosphate
  modified_base 17: mod_base = OTHER; note = 2'-O-methyladenosine-3'-phosphate
  modified_base 18: mod_base = OTHER; note = 2'-O-methyladenosine-3'-phosphate
  modified_base 19: mod_base = OTHER; note = 2'-O-methylcytidine-3'-phosphate
  modified_base 20: mod_base = OTHER; note = 2'-O-methyladenosine-3'-phosphate
  modified_base 21: mod_base = OTHER; note = 2'-O-methyluridine-3'-phosphate attached to N-[tris(N-acetylgalactosamine-alkyl)-amidodecanoyl)]-4-hydr oxyprolinol Hyp-(N-acetylgalactosamine-alkyl)3
caagttcatcattcccaacat

SEQ ID NO: 3088 - RNA, 21 nt, synthetic construct
  misc_feature 1..21: note = Description of Artificial Sequence: Synthetic oligonucleotide
  source 1..21: mol_type = other RNA
  modified_base 1: mod_base = OTHER; note = 2'-O-methylguanosine-3'- phosphorothioate
  modified_base 2: mod_base = OTHER; note = 2'-O-methylcytidine-3'- phosphorothioate
  modified_base 3: mod_base = OTHER; note = 2'-O-methyladenosine-3'-phosphate
  modified_base 4: mod_base = OTHER; note = 2'-O-methyladenosine-3'-phosphate
  modified_base 5: mod_base = OTHER; note = 2'-O-methyluridine-3'-phosphate
  modified_base 6: mod_base = OTHER; note = 2'-O-methyladenosine-3'-phosphate
  modified_base 7: mod_base = OTHER; note = 2'-fluorouridine-3'-phosphate
  modified_base 8: mod_base = OTHER; note = 2'-O-methyluridine-3'-phosphate
  modified_base 9: mod_base = OTHER; note = 2'-fluoroadenosine-3'-phosphate
  modified_base 10: mod_base = OTHER; note = 2'-fluorouridine-3'-phosphate
  modified_base 11: mod_base = OTHER; note = 2'-fluoroguanosine-3'-phosphate
  modified_base 12: mod_base = OTHER; note = 2'-O-methyluridine-3'-phosphate
  modified_base 13: mod_base = OTHER; note = 2'-O-methylguanosine-3'-phosphate
  modified_base 14: mod_base = OTHER; note = 2'-O-methyladenosine-3'-phosphate
  modified_base 15: mod_base = OTHER; note = 2'-O-methylguanosine-3'-phosphate
  modified_base 16: mod_base = OTHER; note = 2'-O-methyladenosine-3'-phosphate
  modified_base 17: mod_base = OTHER; note = 2'-O-methyluridine-3'-phosphate
  modified_base 18: mod_base = OTHER; note = 2'-O-methylguanosine-3'-phosphate
  modified_base 19: mod_base = OTHER; note = 2'-O-methyluridine-3'-phosphate
  modified_base 20: mod_base = OTHER; note = 2'-O-methyladenosine-3'-phosphate
  modified_base 21: mod_base = OTHER; note = 2'-O-methyladenosine-3'-phosphate attached to N-[tris(N-acetylgalactosamine-alkyl)-amidodecanoyl)]-4-hydr oxyprolinol Hyp-(N-acetylgalactosamine-alkyl)3
gcaatattatgtgagatgtaa

SEQ ID NO: 3089 - RNA, 21 nt, synthetic construct
  misc_feature 1..21: note = Description of Artificial Sequence: Synthetic oligonucleotide
  source 1..21: mol_type = other RNA
  modified_base 1: mod_base = OTHER; note = 2'-O-methylguanosine-3'- phosphorothioate
  modified_base 2: mod_base = OTHER; note = 2'-O-methyluridine-3'-phosphorothioate
  modified_base 3: mod_base = OTHER; note = 2'-O-methylcytidine-3'-phosphate
  modified_base 4: mod_base = OTHER; note = 2'-O-methyluridine-3'-phosphate
  modified_base 5: mod_base = OTHER; note = 2'-O-methylcytidine-3'-phosphate
  modified_base 6: mod_base = OTHER; note = 2'-O-methyladenosine-3'-phosphate
  modified_base 7: mod_base = OTHER; note = 2'-fluoroadenosine-3'-phosphate
  modified_base 8: mod_base = OTHER; note = 2'-O-methyladenosine-3'-phosphate
  modified_base 9: mod_base = OTHER; note = 2'-fluoroadenosine-3'-phosphate
  modified_base 10: mod_base = OTHER; note = 2'-fluoroguanosine-3'-phosphate
  modified_base 11: mod_base = OTHER; note = 2'-fluoroadenosine-3'-phosphate
  modified_base 12: mod_base = OTHER; note = 2'-O-methyluridine-3'-phosphate
  modified_base 13: mod_base = OTHER; note = 2'-O-methyluridine-3'-phosphate
  modified_base 14: mod_base = OTHER; note = 2'-O-methylcytidine-3'-phosphate
  modified_base 15: mod_base = OTHER; note = 2'-O-methyladenosine-3'-phosphate
  modified_base 16: mod_base = OTHER; note = 2'-O-methyladenosine-3'-phosphate
  modified_base 17: mod_base = OTHER; note = 2'-O-methyladenosine-3'-phosphate
  modified_base 18: mod_base = OTHER; note = 2'-O-methylguanosine-3'-phosphate
  modified_base 19: mod_base = OTHER; note = 2'-O-methyluridine-3'-phosphate
  modified_base 20: mod_base = OTHER; note = 2'-O-methylcytidine-3'-phosphate
  modified_base 21: mod_base = OTHER; note = 2'-O-methyladenosine-3'-phosphate attached to N-[tris(N-acetylgalactosamine-alkyl)-amidodecanoyl)]-4-hydr oxyprolinol Hyp-(N-acetylgalactosamine-alkyl)3
gtctcaaaagattcaaagtca

SEQ ID NO: 3090 - RNA, 21 nt, synthetic construct
  misc_feature 1..21: note = Description of Artificial Sequence: Synthetic oligonucleotide
  source 1..21: mol_type = other RNA
  modified_base 1: mod_base = OTHER; note = 2'-O-methylcytidine-3'- phosphorothioate
  modified_base 2: mod_base = OTHER; note = 2'-O-methyladenosine-3'- phosphorothioate
  modified_base 3: mod_base = OTHER; note = 2'-O-methyluridine-3'-phosphate
  modified_base 4: mod_base = OTHER; note = 2'-O-methyluridine-3'-phosphate
  modified_base 5: mod_base = OTHER; note = 2'-O-methylcytidine-3'-phosphate
  modified_base 6: mod_base = OTHER; note = 2'-O-methylcytidine-3'-phosphate
  modified_base 7: mod_base = OTHER; note = 2'-fluorocytidine-3'-phosphate
  modified_base 8: mod_base = OTHER; note = 2'-O-methyladenosine-3'-phosphate
  modified_base 9: mod_base = OTHER; note = 2'-fluoroadenosine-3'-phosphate
  modified_base 10: mod_base = OTHER; note = 2'-fluorocytidine-3'-phosphate
  modified_base 11: mod_base = OTHER; note = 2'-fluoroadenosine-3'-phosphate
  modified_base 12: mod_base = OTHER; note = 2'-O-methyluridine-3'-phosphate
  modified_base 13: mod_base = OTHER; note = 2'-O-methyluridine-3'-phosphate
  modified_base 14: mod_base = OTHER; note = 2'-O-methylguanosine-3'-phosphate
  modified_base 15: mod_base = OTHER; note = 2'-O-methyluridine-3'-phosphate
  modified_base 16: mod_base = OTHER; note = 2'-O-methylcytidine-3'-phosphate
  modified_base 17: mod_base = OTHER; note = 2'-O-methyladenosine-3'-phosphate
  modified_base 18: mod_base = OTHER; note = 2'-O-methyladenosine-3'-phosphate
  modified_base 19: mod_base = OTHER; note = 2'-O-methylguanosine-3'-phosphate
  modified_base 20: mod_base = OTHER; note = 2'-O-methyluridine-3'-phosphate
  modified_base 21: mod_base = OTHER; note = 2'-O-methyladenosine-3'-phosphate attached to N-[tris(N-acetylgalactosamine-alkyl)-amidodecanoyl)]-4-hydr oxyprolinol Hyp-(N-acetylgalactosamine-alkyl)3
cattcccaacattgtcaagta

SEQ ID NO: 3091 - RNA, 21 nt, synthetic construct
  misc_feature 1..21: note = Description of Artificial Sequence: Synthetic oligonucleotide
  source 1..21: mol_type = other RNA
  modified_base 1: mod_base = OTHER; note = 2'-O-methyladenosine-3'- phosphorothioate
  modified_base 2: mod_base = OTHER; note = 2'-O-methyladenosine-3'- phosphorothioate
  modified_base 3: mod_base = OTHER; note = 2'-O-methyladenosine-3'-phosphate
  modified_base 4: mod_base = OTHER; note = 2'-O-methylcytidine-3'-phosphate
  modified_base 5: mod_base = OTHER; note = 2'-O-methylcytidine-3'-phosphate
  modified_base 6: mod_base = OTHER; note = 2'-O-methyluridine-3'-phosphate
  modified_base 7: mod_base = OTHER; note = 2'-fluorouridine-3'-phosphate
  modified_base 8: mod_base = OTHER; note = 2'-O-methylguanosine-3'-phosphate
  modified_base 9: mod_base = OTHER; note = 2'-fluoroadenosine-3'-phosphate
  modified_base 10: mod_base = OTHER; note = 2'-fluoroadenosine-3'-phosphate
  modified_base 11: mod_base = OTHER; note = 2'-fluorocytidine-3'-phosphate
  modified_base 12: mod_base = OTHER; note = 2'-O-methyladenosine-3'-phosphate
  modified_base 13: mod_base = OTHER; note = 2'-O-methylguanosine-3'-phosphate
  modified_base 14: mod_base = OTHER; note = 2'-O-methyluridine-3'-phosphate
  modified_base 15: mod_base = OTHER; note = 2'-O-methylguanosine-3'-phosphate
  modified_base 16: mod_base = OTHER; note = 2'-O-methyladenosine-3'-phosphate
  modified_base 17: mod_base = OTHER; note = 2'-O-methyladenosine-3'-phosphate
  modified_base 18: mod_base = OTHER; note = 2'-O-methyladenosine-3'-phosphate
  modified_base 19: mod_base = OTHER; note = 2'-O-methyladenosine-3'-phosphate
  modified_base 20: mod_base = OTHER; note = 2'-O-methyladenosine-3'-phosphate
  modified_base 21: mod_base = OTHER; note = 2'-O-methyladenosine-3'-phosphate attached to N-[tris(N-acetylgalactosamine-alkyl)-amidodecanoyl)]-4-hydr oxyprolinol Hyp-(N-acetylgalactosamine-alkyl)3
aaaccttgaacagtgaaaaaa

SEQ ID NO: 3092 - RNA, 21 nt, synthetic construct
  misc_feature 1..21: note = Description of Artificial Sequence: Synthetic oligonucleotide
  source 1..21: mol_type = other RNA
  modified_base 1: mod_base = OTHER; note = 2'-O-methyluridine-3'-phosphorothioate
  modified_base 2: mod_base = OTHER; note = 2'-O-methylcytidine-3'- phosphorothioate
  modified_base 3: mod_base = OTHER; note = 2'-O-methyladenosine-3'-phosphate
  modified_base 4: mod_base = OTHER; note = 2'-O-methyladenosine-3'-phosphate
  modified_base 5: mod_base = OTHER; note = 2'-O-methyladenosine-3'-phosphate
  modified_base 6: mod_base = OTHER; note = 2'-O-methyladenosine-3'-phosphate
  modified_base 7: mod_base = OTHER; note = 2'-fluoroguanosine-3'-phosphate
  modified_base 8: mod_base = OTHER; note = 2'-O-methyladenosine-3'-phosphate
  modified_base 9: mod_base = OTHER; note = 2'-fluorouridine-3'-phosphate
  modified_base 10: mod_base = OTHER; note = 2'-fluorouridine-3'-phosphate
  modified_base 11: mod_base = OTHER; note = 2'-fluorocytidine-3'-phosphate
  modified_base 12: mod_base = OTHER; note = 2'-O-methyladenosine-3'-phosphate
  modified_base 13: mod_base = OTHER; note = 2'-O-methyladenosine-3'-phosphate
  modified_base 14: mod_base = OTHER; note = 2'-O-methyladenosine-3'-phosphate
  modified_base 15: mod_base = OTHER; note = 2'-O-methylguanosine-3'-phosphate
  modified_base 16: mod_base = OTHER; note = 2'-O-methyluridine-3'-phosphate
  modified_base 17: mod_base = OTHER; note = 2'-O-methylcytidine-3'-phosphate
  modified_base 18: mod_base = OTHER; note = 2'-O-methylcytidine-3'-phosphate
  modified_base 19: mod_base = OTHER; note = 2'-O-methyladenosine-3'-phosphate
  modified_base 20: mod_base = OTHER; note = 2'-O-methyladenosine-3'-phosphate
  modified_base 21: mod_base = OTHER; note = 2'-O-methyladenosine-3'-phosphate attached to N-[tris(N-acetylgalactosamine-alkyl)-amidodecanoyl)]-4-hydr oxyprolinol Hyp-(N-acetylgalactosamine-alkyl)3
tcaaaagattcaaagtccaaa

SEQ ID NO: 3093 - RNA, 21 nt, synthetic construct
  misc_feature 1..21: note = Description of Artificial Sequence: Synthetic oligonucleotide
  source 1..21: mol_type = other RNA
  modified_base 1: mod_base = OTHER; note = 2'-O-methyladenosine-3'- phosphorothioate
  modified_base 2: mod_base = OTHER; note = 2'-O-methylcytidine-3'- phosphorothioate
  modified_base 3: mod_base = OTHER; note = 2'-O-methyladenosine-3'-phosphate
  modified_base 4: mod_base = OTHER; note = 2'-O-methyluridine-3'-phosphate
  modified_base 5: mod_base = OTHER; note = 2'-O-methylcytidine-3'-phosphate
  modified_base 6: mod_base = OTHER; note = 2'-O-methyluridine-3'-phosphate
  modified_base 7: mod_base = OTHER; note = 2'-fluorouridine-3'-phosphate
  modified_base 8: mod_base = OTHER; note = 2'-O-methylcytidine-3'-phosphate
  modified_base 9: mod_base = OTHER; note = 2'-fluoroadenosine-3'-phosphate
  modified_base 10: mod_base = OTHER; note = 2'-fluoroadenosine-3'-phosphate
  modified_base 11: mod_base = OTHER; note = 2'-fluoroguanosine-3'-phosphate
  modified_base 12: mod_base = OTHER; note = 2'-O-methyluridine-3'-phosphate
  modified_base 13: mod_base = OTHER; note = 2'-O-methyluridine-3'-phosphate
  modified_base 14: mod_base = OTHER; note = 2'-O-methylcytidine-3'-phosphate
  modified_base 15: mod_base = OTHER; note = 2'-O-methyladenosine-3'-phosphate
  modified_base 16: mod_base = OTHER; note = 2'-O-methyluridine-3'-phosphate
  modified_base 17: mod_base = OTHER; note = 2'-O-methylcytidine-3'-phosphate
  modified_base 18: mod_base = OTHER; note = 2'-O-methyladenosine-3'-phosphate
  modified_base 19: mod_base = OTHER; note = 2'-O-methyluridine-3'-phosphate
  modified_base 20: mod_base = OTHER; note = 2'-O-methyluridine-3'-phosphate
  modified_base 21: mod_base = OTHER; note = 2'-O-methyladenosine-3'-phosphate attached to N-[tris(N-acetylgalactosamine-alkyl)-amidodecanoyl)]-4-hydr oxyprolinol Hyp-(N-acetylgalactosamine-alkyl)3
acatcttcaagttcatcatta

SEQ ID NO: 3094 - RNA, 21 nt, synthetic construct
  misc_feature 1..21: note = Description of Artificial Sequence: Synthetic oligonucleotide
  source 1..21: mol_type = other RNA
  modified_base 1: mod_base = OTHER; note = 2'-O-methylcytidine-3'- phosphorothioate
  modified_base 2: mod_base = OTHER; note = 2'-O-methyladenosine-3'- phosphorothioate
  modified_base 3: mod_base = OTHER; note = 2'-O-methylguanosine-3'-phosphate
  modified_base 4: mod_base = OTHER; note = 2'-O-methylcytidine-3'-phosphate
  modified_base 5: mod_base = OTHER; note = 2'-O-methyluridine-3'-phosphate
  modified_base 6: mod_base = OTHER; note = 2'-O-methylguanosine-3'-phosphate
  modified_base 7: mod_base = OTHER; note = 2'-fluoroadenosine-3'-phosphate
  modified_base 8: mod_base = OTHER; note = 2'-O-methyluridine-3'-phosphate
  modified_base 9: mod_base = OTHER; note = 2'-fluorouridine-3'-phosphate
  modified_base 10: mod_base = OTHER; note = 2'-fluoroguanosine-3'-phosphate
  modified_base 11: mod_base = OTHER; note = 2'-fluorouridine-3'-phosphate
  modified_base 12: mod_base = OTHER; note = 2'-O-methylguanosine-3'-phosphate
  modified_base 13: mod_base = OTHER; note = 2'-O-methyladenosine-3'-phosphate
  modified_base 14: mod_base = OTHER; note = 2'-O-methyladenosine-3'-phosphate
  modified_base 15: mod_base = OTHER; note = 2'-O-methyluridine-3'-phosphate
  modified_base 16: mod_base = OTHER; note = 2'-O-methylcytidine-3'-phosphate
  modified_base 17: mod_base = OTHER; note = 2'-O-methyluridine-3'-phosphate
  modified_base 18: mod_base = OTHER; note = 2'-O-methyluridine-3'-phosphate
  modified_base 19: mod_base = OTHER; note = 2'-O-methylcytidine-3'-phosphate
  modified_base 20: mod_base = OTHER; note = 2'-O-methyluridine-3'-phosphate
  modified_base 21: mod_base = OTHER; note = 2'-O-methyluridine-3'-phosphate attached to N-[tris(N-acetylgalactosamine-alkyl)-amidodecanoyl)]-4-hydr oxyprolinol Hyp-(N-acetylgalactosamine-alkyl)3
cagctgattgtgaatcttctt

SEQ ID NO: 3095 - RNA, 21 nt, synthetic construct
  misc_feature 1..21: note = Description of Artificial Sequence: Synthetic oligonucleotide
  source 1..21: mol_type = other RNA
  modified_base 1: mod_base = OTHER; note = 2'-O-methylcytidine-3'- phosphorothioate
  modified_base 2: mod_base = OTHER; note = 2'-O-methyluridine-3'-phosphorothioate
  modified_base 3: mod_base = OTHER; note = 2'-O-methylcytidine-3'-phosphate
  modified_base 4: mod_base = OTHER; note = 2'-O-methyladenosine-3'-phosphate
  modified_base 5: mod_base = OTHER; note = 2'-O-methyladenosine-3'-phosphate
  modified_base 6: mod_base = OTHER; note = 2'-O-methyladenosine-3'-phosphate
  modified_base 7: mod_base = OTHER; note = 2'-fluoroadenosine-3'-phosphate
  modified_base 8: mod_base = OTHER; note = 2'-O-methylguanosine-3'-phosphate
  modified_base 9: mod_base = OTHER; note = 2'-fluoroadenosine-3'-phosphate
  modified_base 10: mod_base = OTHER; note = 2'-fluorouridine-3'-phosphate
  modified_base 11: mod_base = OTHER; note = 2'-fluorouridine-3'-phosphate
  modified_base 12: mod_base = OTHER; note = 2'-O-methylcytidine-3'-phosphate
  modified_base 13: mod_base = OTHER; note = 2'-O-methyladenosine-3'-phosphate
  modified_base 14: mod_base = OTHER; note = 2'-O-methyladenosine-3'-phosphate
  modified_base 15: mod_base = OTHER; note = 2'-O-methyladenosine-3'-phosphate
  modified_base 16: mod_base = OTHER; note = 2'-O-methylguanosine-3'-phosphate
  modified_base 17: mod_base = OTHER; note = 2'-O-methyluridine-3'-phosphate
  modified_base 18: mod_base = OTHER; note = 2'-O-methylcytidine-3'-phosphate
  modified_base 19: mod_base = OTHER; note = 2'-O-methylcytidine-3'-phosphate
  modified_base 20: mod_base = OTHER; note = 2'-O-methyladenosine-3'-phosphate
  modified_base 21: mod_base = OTHER; note = 2'-O-methyladenosine-3'-phosphate attached to N-[tris(N-acetylgalactosamine-alkyl)-amidodecanoyl)]-4-hydr oxyprolinol Hyp-(N-acetylgalactosamine-alkyl)3
ctcaaaagattcaaagtccaa

SEQ ID NO: 3096 - RNA, 21 nt, synthetic construct
  misc_feature 1..21: note = Description of Artificial Sequence: Synthetic oligonucleotide
  source 1..21: mol_type = other RNA
  modified_base 1: mod_base = OTHER; note = 2'-O-methyladenosine-3'- phosphorothioate
  modified_base 2: mod_base = OTHER; note = 2'-O-methyladenosine-3'- phosphorothioate
  modified_base 3: mod_base = OTHER; note = 2'-O-methyladenosine-3'-phosphate
  modified_base 4: mod_base = OTHER; note = 2'-O-methyladenosine-3'-phosphate
  modified_base 5: mod_base = OTHER; note = 2'-O-methylcytidine-3'-phosphate
  modified_base 6: mod_base = OTHER; note = 2'-O-methylcytidine-3'-phosphate
  modified_base 7: mod_base = OTHER; note = 2'-fluoroguanosine-3'-phosphate
  modified_base 8: mod_base = OTHER; note = 2'-O-methyladenosine-3'-phosphate
  modified_base 9: mod_base = OTHER; note = 2'-fluoroguanosine-3'-phosphate
  modified_base 10: mod_base = OTHER; note = 2'-fluorouridine-3'-phosphate
  modified_base 11: mod_base = OTHER; note = 2'-fluoroadenosine-3'-phosphate
  modified_base 12: mod_base = OTHER; note = 2'-O-methyladenosine-3'-phosphate
  modified_base 13: mod_base = OTHER; note = 2'-O-methyluridine-3'-phosphate
  modified_base 14: mod_base = OTHER; note = 2'-O-methyluridine-3'-phosphate
  modified_base 15: mod_base = OTHER; note = 2'-O-methylguanosine-3'-phosphate
  modified_base 16: mod_base = OTHER; note = 2'-O-methylguanosine-3'-phosphate
  modified_base 17: mod_base = OTHER; note = 2'-O-methyladenosine-3'-phosphate
  modified_base 18: mod_base = OTHER; note = 2'-O-methyladenosine-3'-phosphate
  modified_base 19: mod_base = OTHER; note = 2'-O-methylguanosine-3'-phosphate
  modified_base 20: mod_base = OTHER; note = 2'-O-methyluridine-3'-phosphate
  modified_base 21: mod_base = OTHER; note = 2'-O-methyladenosine-3'-phosphate attached to N-[tris(N-acetylgalactosamine-alkyl)-amidodecanoyl)]-4-hydr oxyprolinol Hyp-(N-acetylgalactosamine-alkyl)3
aaaaccgagtaattggaagta

SEQ ID NO: 3097 - RNA, 21 nt, synthetic construct
  misc_feature 1..21: note = Description of Artificial Sequence: Synthetic oligonucleotide
  source 1..21: mol_type = other RNA
  modified_base 1: mod_base = OTHER; note = 2'-O-methyluridine-3'-phosphorothioate
  modified_base 2: mod_base = OTHER; note = 2'-O-methylguanosine-3'- phosphorothioate
  modified_base 3: mod_base = OTHER; note = 2'-O-methyladenosine-3'-phosphate
  modified_base 4: mod_base = OTHER; note = 2'-O-methyluridine-3'-phosphate
  modified_base 5: mod_base = OTHER; note = 2'-O-methylguanosine-3'-phosphate
  modified_base 6: mod_base = OTHER; note = 2'-O-methylcytidine-3'-phosphate
  modified_base 7: mod_base = OTHER; note = 2'-fluoroadenosine-3'-phosphate
  modified_base 8: mod_base = OTHER; note = 2'-O-methyluridine-3'-phosphate
  modified_base 9: mod_base = OTHER; note = 2'-fluoroadenosine-3'-phosphate
  modified_base 10: mod_base = OTHER; note = 2'-fluorouridine-3'-phosphate
  modified_base 11: mod_base = OTHER; note = 2'-fluorocytidine-3'-phosphate
  modified_base 12: mod_base = OTHER; note = 2'-O-methyluridine-3'-phosphate
  modified_base 13: mod_base = OTHER; note = 2'-O-methyluridine-3'-phosphate
  modified_base 14: mod_base = OTHER; note = 2'-O-methylguanosine-3'-phosphate
  modified_base 15: mod_base = OTHER; note = 2'-O-methyluridine-3'-phosphate
  modified_base 16: mod_base = OTHER; note = 2'-O-methylguanosine-3'-phosphate
  modified_base 17: mod_base = OTHER; note = 2'-O-methylcytidine-3'-phosphate
  modified_base 18: mod_base = OTHER; note = 2'-O-methyladenosine-3'-phosphate
  modified_base 19: mod_base = OTHER; note = 2'-O-methyluridine-3'-phosphate
  modified_base 20: mod_base = OTHER; note = 2'-O-methyladenosine-3'-phosphate
  modified_base 21: mod_base = OTHER; note = 2'-O-methyladenosine-3'-phosphate attached to N-[tris(N-acetylgalactosamine-alkyl)-amidodecanoyl)]-4-hydr oxyprolinol Hyp-(N-acetylgalactosamine-alkyl)3
tgatgcatatcttgtgcataa

SEQ ID NO: 3098 - RNA, 21 nt, synthetic construct
  misc_feature 1..21: note = Description of Artificial Sequence: Synthetic oligonucleotide
  source 1..21: mol_type = other RNA
  modified_base 1: mod_base = OTHER; note = 2'-O-methylcytidine-3'- phosphorothioate
  modified_base 2: mod_base = OTHER; note = 2'-O-methylcytidine-3'- phosphorothioate
  modified_base 3: mod_base = OTHER; note = 2'-O-methyladenosine-3'-phosphate
  modified_base 4: mod_base = OTHER; note = 2'-O-methyluridine-3'-phosphate
  modified_base 5: mod_base = OTHER; note = 2'-O-methylcytidine-3'-phosphate
  modified_base 6: mod_base = OTHER; note = 2'-O-methyladenosine-3'-phosphate
  modified_base 7: mod_base = OTHER; note = 2'-fluoroguanosine-3'-phosphate
  modified_base 8: mod_base = OTHER; note = 2'-O-methyluridine-3'-phosphate
  modified_base 9: mod_base = OTHER; note = 2'-fluoroadenosine-3'-phosphate
  modified_base 10: mod_base = OTHER; note = 2'-fluorouridine-3'-phosphate
  modified_base 11: mod_base = OTHER; note = 2'-fluorocytidine-3'-phosphate
  modified_base 12: mod_base = OTHER; note = 2'-O-methyluridine-3'-phosphate
  modified_base 13: mod_base = OTHER; note = 2'-O-methyluridine-3'-phosphate
  modified_base 14: mod_base = OTHER; note = 2'-O-methyladenosine-3'-phosphate
  modified_base 15: mod_base = OTHER; note = 2'-O-methyladenosine-3'-phosphate
  modified_base 16: mod_base = OTHER; note = 2'-O-methyluridine-3'-phosphate
  modified_base 17: mod_base = OTHER; note = 2'-O-methylguanosine-3'-phosphate
  modified_base 18: mod_base = OTHER; note = 2'-O-methyladenosine-3'-phosphate
  modified_base 19: mod_base = OTHER; note = 2'-O-methyladenosine-3'-phosphate
  modified_base 20: mod_base = OTHER; note = 2'-O-methylguanosine-3'-phosphate
  modified_base 21: mod_base = OTHER; note = 2'-O-methyladenosine-3'-phosphate attached to N-[tris(N-acetylgalactosamine-alkyl)-amidodecanoyl)]-4-hydr oxyprolinol Hyp-(N-acetylgalactosamine-alkyl)3
ccatcagtatcttaatgaaga

SEQ ID NO: 3099 - RNA, 21 nt, synthetic construct
  misc_feature 1..21: note = Description of Artificial Sequence: Synthetic oligonucleotide
  source 1..21: mol_type = other RNA
  modified_base 1: mod_base = OTHER; note = 2'-O-methyladenosine-3'- phosphorothioate
  modified_base 2: mod_base = OTHER; note = 2'-O-methyladenosine-3'- phosphorothioate
  modified_base 3: mod_base = OTHER; note = 2'-O-methyluridine-3'-phosphate
  modified_base 4: mod_base = OTHER; note = 2'-O-methylcytidine-3'-phosphate
  modified_base 5: mod_base = OTHER; note = 2'-O-methyladenosine-3'-phosphate
  modified_base 6: mod_base = OTHER; note = 2'-O-methylguanosine-3'-phosphate
  modified_base 7: mod_base = OTHER; note = 2'-fluorouridine-3'-phosphate
  modified_base 8: mod_base = OTHER; note = 2'-O-methylguanosine-3'-phosphate
  modified_base 9: mod_base = OTHER; note = 2'-fluoroguanosine-3'-phosphate
  modified_base 10: mod_base = OTHER; note = 2'-fluorocytidine-3'-phosphate
  modified_base 11: mod_base = OTHER; note = 2'-fluorouridine-3'-phosphate
  modified_base 12: mod_base = OTHER; note = 2'-O-methyluridine-3'-phosphate
  modified_base 13: mod_base = OTHER; note = 2'-O-methyluridine-3'-phosphate
  modified_base 14: mod_base = OTHER; note = 2'-O-methylcytidine-3'-phosphate
  modified_base 15: mod_base = OTHER; note = 2'-O-methylcytidine-3'-phosphate
  modified_base 16: mod_base = OTHER; note = 2'-O-methylcytidine-3'-phosphate
  modified_base 17: mod_base = OTHER; note = 2'-O-methyladenosine-3'-phosphate
  modified_base 18: mod_base = OTHER; note = 2'-O-methyladenosine-3'-phosphate
  modified_base 19: mod_base = OTHER; note = 2'-O-methyladenosine-3'-phosphate
  modified_base 20: mod_base = OTHER; note = 2'-O-methyladenosine-3'-phosphate
  modified_base 21: mod_base = OTHER; note = 2'-O-methyladenosine-3'-phosphate attached to N-[tris(N-acetylgalactosamine-alkyl)-amidodecanoyl)]-4-hydr oxyprolinol Hyp-(N-acetylgalactosamine-alkyl)3
aatcagtggctttcccaaaaa

SEQ ID NO: 3100 - RNA, 21 nt, synthetic construct
  misc_feature 1..21: note = Description of Artificial Sequence: Synthetic oligonucleotide
  source 1..21: mol_type = other RNA
  modified_base 1: mod_base = OTHER; note = 2'-O-methyluridine-3'-phosphorothioate
  modified_base 2: mod_base = OTHER; note = 2'-O-methyluridine-3'-phosphorothioate
  modified_base 3: mod_base = OTHER; note = 2'-O-methyladenosine-3'-phosphate
  modified_base 4: mod_base = OTHER; note = 2'-O-methyladenosine-3'-phosphate
  modified_base 5: mod_base = OTHER; note = 2'-O-methyladenosine-3'-phosphate
  modified_base 6: mod_base = OTHER; note = 2'-O-methyladenosine-3'-phosphate
  modified_base 7: mod_base = OTHER; note = 2'-fluorocytidine-3'-phosphate
  modified_base 8: mod_base = OTHER; note = 2'-O-methyladenosine-3'-phosphate
  modified_base 9: mod_base = OTHER; note = 2'-fluorocytidine-3'-phosphate
  modified_base 10: mod_base = OTHER; note = 2'-fluorocytidine-3'-phosphate
  modified_base 11: mod_base = OTHER; note = 2'-fluoroadenosine-3'-phosphate
  modified_base 12: mod_base = OTHER; note = 2'-O-methyladenosine-3'-phosphate
  modified_base 13: mod_base = OTHER; note = 2'-O-methyladenosine-3'-phosphate
  modified_base 14: mod_base = OTHER; note = 2'-O-methyladenosine-3'-phosphate
  modified_base 15: mod_base = OTHER; note = 2'-O-methyladenosine-3'-phosphate
  modified_base 16: mod_base = OTHER; note = 2'-O-methyluridine-3'-phosphate
  modified_base 17: mod_base = OTHER; note = 2'-O-methyluridine-3'-phosphate
  modified_base 18: mod_base = OTHER; note = 2'-O-methylguanosine-3'-phosphate
  modified_base 19: mod_base = OTHER; note = 2'-O-methyluridine-3'-phosphate
  modified_base 20: mod_base = OTHER; note = 2'-O-methylcytidine-3'-phosphate
  modified_base 21: mod_base = OTHER; note = 2'-O-methyluridine-3'-phosphate attached to N-[tris(N-acetylgalactosamine-alkyl)-amidodecanoyl)]-4-hydr oxyprolinol Hyp-(N-acetylgalactosamine-alkyl)3
ttaaaacaccaaaaattgtct

SEQ ID NO: 3101 - RNA, 21 nt, synthetic construct
  misc_feature 1..21: note = Description of Artificial Sequence: Synthetic oligonucleotide
  source 1..21: mol_type = other RNA
  modified_base 1: mod_base = OTHER; note = 2'-O-methylcytidine-3'- phosphorothioate
  modified_base 2: mod_base = OTHER; note = 2'-O-methyluridine-3'-phosphorothioate
  modified_base 3: mod_base = OTHER; note = 2'-O-methylguanosine-3'-phosphate
  modified_base 4: mod_base = OTHER; note = 2'-O-methyladenosine-3'-phosphate
  modified_base 5: mod_base = OTHER; note = 2'-O-methyluridine-3'-phosphate
  modified_base 6: mod_base = OTHER; note = 2'-O-methyluridine-3'-phosphate
  modified_base 7: mod_base = OTHER; note = 2'-fluoroguanosine-3'-phosphate
  modified_base 8: mod_base = OTHER; note = 2'-O-methyluridine-3'-phosphate
  modified_base 9: mod_base = OTHER; note = 2'-fluoroguanosine-3'-phosphate
  modified_base 10: mod_base = OTHER; note = 2'-fluoroadenosine-3'-phosphate
  modified_base 11: mod_base = OTHER; note = 2'-fluoroadenosine-3'-phosphate
  modified_base 12: mod_base = OTHER; note = 2'-O-methyluridine-3'-phosphate
  modified_base 13: mod_base = OTHER; note = 2'-O-methylcytidine-3'-phosphate
  modified_base 14: mod_base = OTHER; note = 2'-O-methyluridine-3'-phosphate
  modified_base 15: mod_base = OTHER; note = 2'-O-methyluridine-3'-phosphate
  modified_base 16: mod_base = OTHER; note = 2'-O-methylcytidine-3'-phosphate
  modified_base 17: mod_base = OTHER; note = 2'-O-methyluridine-3'-phosphate
  modified_base 18: mod_base = OTHER; note = 2'-O-methyluridine-3'-phosphate
  modified_base 19: mod_base = OTHER; note = 2'-O-methyladenosine-3'-phosphate
  modified_base 20: mod_base = OTHER; note = 2'-O-methyladenosine-3'-phosphate
  modified_base 21: mod_base = OTHER; note = 2'-O-methyladenosine-3'-phosphate attached to N-[tris(N-acetylgalactosamine-alkyl)-amidodecanoyl)]-4-hydr oxyprolinol Hyp-(N-acetylgalactosamine-alkyl)3
ctgattgtgaatcttcttaaa

SEQ ID NO: 3102 - RNA, 21 nt, synthetic construct
  misc_feature 1..21: note = Description of Artificial Sequence: Synthetic oligonucleotide
  source 1..21: mol_type = other RNA
  modified_base 1: mod_base = OTHER; note = 2'-O-methyladenosine-3'- phosphorothioate
  modified_base 2: mod_base = OTHER; note = 2'-O-methyluridine-3'-phosphorothioate
  modified_base 3: mod_base = OTHER; note = 2'-O-methyladenosine-3'-phosphate
  modified_base 4: mod_base = OTHER; note = 2'-O-methyladenosine-3'-phosphate
  modified_base 5: mod_base = OTHER; note = 2'-O-methyladenosine-3'-phosphate
  modified_base 6: mod_base = OTHER; note = 2'-O-methyladenosine-3'-phosphate
  modified_base 7: mod_base = OTHER; note = 2'-fluorocytidine-3'-phosphate
  modified_base 8: mod_base = OTHER; note = 2'-O-methylcytidine-3'-phosphate
  modified_base 9: mod_base = OTHER; note = 2'-fluorouridine-3'-phosphate
  modified_base 10: mod_base = OTHER; note = 2'-fluorouridine-3'-phosphate
  modified_base 11: mod_base = OTHER; note = 2'-fluoroguanosine-3'-phosphate
  modified_base 12: mod_base = OTHER; note = 2'-O-methyladenosine-3'-phosphate
  modified_base 13: mod_base = OTHER; note = 2'-O-methyladenosine-3'-phosphate
  modified_base 14: mod_base = OTHER; note = 2'-O-methylcytidine-3'-phosphate
  modified_base 15: mod_base = OTHER; note = 2'-O-methyladenosine-3'-phosphate
  modified_base 16: mod_base = OTHER; note = 2'-O-methylguanosine-3'-phosphate
  modified_base 17: mod_base = OTHER; note = 2'-O-methyluridine-3'-phosphate
  modified_base 18: mod_base = OTHER; note = 2'-O-methylguanosine-3'-phosphate
  modified_base 19: mod_base = OTHER; note = 2'-O-methyladenosine-3'-phosphate
  modified_base 20: mod_base = OTHER; note = 2'-O-methyladenosine-3'-phosphate
  modified_base 21: mod_base = OTHER; note = 2'-O-methyladenosine-3'-phosphate attached to N-[tris(N-acetylgalactosamine-alkyl)-amidodecanoyl)]-4-hydr oxyprolinol Hyp-(N-acetylgalactosamine-alkyl)3
ataaaaccttgaacagtgaaa

SEQ ID NO: 3103 - RNA, 21 nt, synthetic construct
  misc_feature 1..21: note = Description of Artificial Sequence: Synthetic oligonucleotide
  source 1..21: mol_type = other RNA
  modified_base 1: mod_base = OTHER; note = 2'-O-methyladenosine-3'- phosphorothioate
  modified_base 2: mod_base = OTHER; note = 2'-O-methylguanosine-3'- phosphorothioate
  modified_base 3: mod_base = OTHER; note = 2'-O-methyluridine-3'-phosphate
  modified_base 4: mod_base = OTHER; note = 2'-O-methylguanosine-3'-phosphate
  modified_base 5: mod_base = OTHER; note = 2'-O-methyluridine-3'-phosphate
  modified_base 6: mod_base = OTHER; note = 2'-O-methylcytidine-3'-phosphate
  modified_base 7: mod_base = OTHER; note = 2'-fluoroadenosine-3'-phosphate
  modified_base 8: mod_base = OTHER; note = 2'-O-methyluridine-3'-phosphate
  modified_base 9: mod_base = OTHER; note = 2'-fluoroguanosine-3'-phosphate
  modified_base 10: mod_base = OTHER; note = 2'-fluorocytidine-3'-phosphate
  modified_base 11: mod_base = OTHER; note = 2'-fluorocytidine-3'-phosphate
  modified_base 12: mod_base = OTHER; note = 2'-O-methyladenosine-3'-phosphate
  modified_base 13: mod_base = OTHER; note = 2'-O-methyladenosine-3'-phosphate
  modified_base 14: mod_base = OTHER; note = 2'-O-methyladenosine-3'-phosphate
  modified_base 15: mod_base = OTHER; note = 2'-O-methyluridine-3'-phosphate
  modified_base 16: mod_base = OTHER; note = 2'-O-methyladenosine-3'-phosphate
  modified_base 17: mod_base = OTHER; note = 2'-O-methyladenosine-3'-phosphate
  modified_base 18: mod_base = OTHER; note = 2'-O-methyladenosine-3'-phosphate
  modified_base 19: mod_base = OTHER; note = 2'-O-methyladenosine-3'-phosphate
  modified_base 20: mod_base = OTHER; note = 2'-O-methylcytidine-3'-phosphate
  modified_base 21: mod_base = OTHER; note = 2'-O-methyladenosine-3'-phosphate attached to N-[tris(N-acetylgalactosamine-alkyl)-amidodecanoyl)]-4-hydr oxyprolinol Hyp-(N-acetylgalactosamine-alkyl)3
agtgtcatgccaaataaaaca

SEQ ID NO: 3104 - RNA, 21 nt, synthetic construct
  misc_feature 1..21: note = Description of Artificial Sequence: Synthetic oligonucleotide
  source 1..21: mol_type = other RNA
  modified_base 1: mod_base = OTHER; note = 2'-O-methyladenosine-3'- phosphorothioate
  modified_base 2: mod_base = OTHER; note = 2'-O-methylcytidine-3'- phosphorothioate
  modified_base 3: mod_base = OTHER; note = 2'-O-methyladenosine-3'-phosphate
  modified_base 4: mod_base = OTHER; note = 2'-O-methylcytidine-3'-phosphate
  modified_base 5: mod_base = OTHER; note = 2'-O-methylcytidine-3'-phosphate
  modified_base 6: mod_base = OTHER; note = 2'-O-methyladenosine-3'-phosphate
  modified_base 7: mod_base = OTHER; note = 2'-fluoroadenosine-3'-phosphate
  modified_base 8: mod_base = OTHER; note = 2'-O-methyladenosine-3'-phosphate
  modified_base 9: mod_base = OTHER; note = 2'-fluoroadenosine-3'-phosphate
  modified_base 10: mod_base = OTHER; note = 2'-fluoroadenosine-3'-phosphate
  modified_base 11: mod_base = OTHER; note = 2'-fluorouridine-3'-phosphate
  modified_base 12: mod_base = OTHER; note = 2'-O-methyluridine-3'-phosphate
  modified_base 13: mod_base = OTHER; note = 2'-O-methylguanosine-3'-phosphate
  modified_base 14: mod_base = OTHER; note = 2'-O-methyluridine-3'-phosphate
  modified_base 15: mod_base = OTHER; note = 2'-O-methylcytidine-3'-phosphate
  modified_base 16: mod_base = OTHER; note = 2'-O-methyluridine-3'-phosphate
  modified_base 17: mod_base = OTHER; note = 2'-O-methylcytidine-3'-phosphate
  modified_base 18: mod_base = OTHER; note = 2'-O-methylcytidine-3'-phosphate
  modified_base 19: mod_base = OTHER; note = 2'-O-methyladenosine-3'-phosphate
  modified_base 20: mod_base = OTHER; note = 2'-O-methylguanosine-3'-phosphate
  modified_base 21: mod_base = OTHER; note = 2'-O-methyladenosine-3'-phosphate attached to N-[tris(N-acetylgalactosamine-alkyl)-amidodecanoyl)]-4-hydr oxyprolinol Hyp-(N-acetylgalactosamine-alkyl)3
acaccaaaaattgtctccaga

SEQ ID NO: 3105 - RNA, 21 nt, synthetic construct
  misc_feature 1..21: note = Description of Artificial Sequence: Synthetic oligonucleotide
  source 1..21: mol_type = other RNA
  modified_base 1: mod_base = OTHER; note = 2'-O-methylguanosine-3'- phosphorothioate
  modified_base 2: mod_base = OTHER; note = 2'-O-methylcytidine-3'- phosphorothioate
  modified_base 3: mod_base = OTHER; note = 2'-O-methyladenosine-3'-phosphate
  modified_base 4: mod_base = OTHER; note = 2'-O-methyluridine-3'-phosphate
  modified_base 5: mod_base = OTHER; note = 2'-O-methyluridine-3'-phosphate
  modified_base 6: mod_base = OTHER; note = 2'-O-methylguanosine-3'-phosphate
  modified_base 7: mod_base = OTHER; note = 2'-fluorocytidine-3'-phosphate
  modified_base 8: mod_base = OTHER; note = 2'-O-methyladenosine-3'-phosphate
  modified_base 9: mod_base = OTHER; note = 2'-fluoroadenosine-3'-phosphate
  modified_base 10: mod_base = OTHER; note = 2'-fluorouridine-3'-phosphate
  modified_base 11: mod_base = OTHER; note = 2'-fluoroadenosine-3'-phosphate
  modified_base 12: mod_base = OTHER; note = 2'-O-methyluridine-3'-phosphate
  modified_base 13: mod_base = OTHER; note = 2'-O-methyluridine-3'-phosphate
  modified_base 14: mod_base = OTHER; note = 2'-O-methyladenosine-3'-phosphate
  modified_base 15: mod_base = OTHER; note = 2'-O-methyluridine-3'-phosphate
  modified_base 16: mod_base = OTHER; note = 2'-O-methylguanosine-3'-phosphate
  modified_base 17: mod_base = OTHER; note = 2'-O-methyluridine-3'-phosphate
  modified_base 18: mod_base = OTHER; note = 2'-O-methylguanosine-3'-phosphate
  modified_base 19: mod_base = OTHER; note = 2'-O-methyladenosine-3'-phosphate
  modified_base 20: mod_base = OTHER; note = 2'-O-methylguanosine-3'-phosphate
  modified_base 21: mod_base = OTHER; note = 2'-O-methyladenosine-3'-phosphate attached to N-[tris(N-acetylgalactosamine-alkyl)-amidodecanoyl)]-4-hydr oxyprolinol Hyp-(N-acetylgalactosamine-alkyl)3
gcattgcaatattatgtgaga

SEQ ID NO: 3106 - RNA, 21 nt, synthetic construct
  misc_feature 1..21: note = Description of Artificial Sequence: Synthetic oligonucleotide
  source 1..21: mol_type = other RNA
  modified_base 1: mod_base = OTHER; note = 2'-O-methylguanosine-3'- phosphorothioate
  modified_base 2: mod_base = OTHER; note = 2'-O-methyluridine-3'-phosphorothioate
  modified_base 3: mod_base = OTHER; note = 2'-O-methylcytidine-3'-phosphate
  modified_base 4: mod_base = OTHER; note = 2'-O-methyladenosine-3'-phosphate
  modified_base 5: mod_base = OTHER; note = 2'-O-methyluridine-3'-phosphate
  modified_base 6: mod_base = OTHER; note = 2'-O-methylguanosine-3'-phosphate
  modified_base 7: mod_base = OTHER; note = 2'-fluorocytidine-3'-phosphate
  modified_base 8: mod_base = OTHER; note = 2'-O-methylcytidine-3'-phosphate
  modified_base 9: mod_base = OTHER; note = 2'-fluoroadenosine-3'-phosphate
  modified_base 10: mod_base = OTHER; note = 2'-fluoroadenosine-3'-phosphate
  modified_base 11: mod_base = OTHER; note = 2'-fluoroadenosine-3'-phosphate
  modified_base 12: mod_base = OTHER; note = 2'-O-methyluridine-3'-phosphate
  modified_base 13: mod_base = OTHER; note = 2'-O-methyladenosine-3'-phosphate
  modified_base 14: mod_base = OTHER; note = 2'-O-methyladenosine-3'-phosphate
  modified_base 15: mod_base = OTHER; note = 2'-O-methyladenosine-3'-phosphate
  modified_base 16: mod_base = OTHER; note = 2'-O-methyladenosine-3'-phosphate
  modified_base 17: mod_base = OTHER; note = 2'-O-methylcytidine-3'-phosphate
  modified_base 18: mod_base = OTHER; note = 2'-O-methylcytidine-3'-phosphate
  modified_base 19: mod_base = OTHER; note = 2'-O-methyluridine-3'-phosphate
  modified_base 20: mod_base = OTHER; note = 2'-O-methyluridine-3'-phosphate
  modified_base 21: mod_base = OTHER; note = 2'-O-methyladenosine-3'-phosphate attached to N-[tris(N-acetylgalactosamine-alkyl)-amidodecanoyl)]-4-hydr oxyprolinol Hyp-(N-acetylgalactosamine-alkyl)3
gtcatgccaaataaaacctta

SEQ ID NO: 3107 - RNA, 21 nt, synthetic construct
  misc_feature 1..21: note = Description of Artificial Sequence: Synthetic oligonucleotide
  source 1..21: mol_type = other RNA
  modified_base 1: mod_base = OTHER; note = 2'-O-methyladenosine-3'- phosphorothioate
  modified_base 2: mod_base = OTHER; note = 2'-O-methyluridine-3'-phosphorothioate
  modified_base 3: mod_base = OTHER; note = 2'-O-methyladenosine-3'-phosphate
  modified_base 4: mod_base = OTHER; note = 2'-O-methyluridine-3'-phosphate
  modified_base 5: mod_base = OTHER; note = 2'-O-methylcytidine-3'-phosphate
  modified_base 6: mod_base = OTHER; note = 2'-O-methyluridine-3'-phosphate
  modified_base 7: mod_base = OTHER; note = 2'-fluorouridine-3'-phosphate
  modified_base 8: mod_base = OTHER; note = 2'-O-methylguanosine-3'-phosphate
  modified_base 9: mod_base = OTHER; note = 2'-fluorouridine-3'-phosphate
  modified_base 10: mod_base = OTHER; note = 2'-fluoroguanosine-3'-phosphate
  modified_base 11: mod_base = OTHER; note = 2'-fluorocytidine-3'-phosphate
  modified_base 12: mod_base = OTHER; note = 2'-O-methyladenosine-3'-phosphate
  modified_base 13: mod_base = OTHER; note = 2'-O-methyluridine-3'-phosphate
  modified_base 14: mod_base = OTHER; note = 2'-O-methyladenosine-3'-phosphate
  modified_base 15: mod_base = OTHER; note = 2'-O-methyladenosine-3'-phosphate
  modified_base 16: mod_base = OTHER; note = 2'-O-methyladenosine-3'-phosphate
  modified_base 17: mod_base = OTHER; note = 2'-O-methyluridine-3'-phosphate
  modified_base 18: mod_base = OTHER; note = 2'-O-methylguanosine-3'-phosphate
  modified_base 19: mod_base = OTHER; note = 2'-O-methyluridine-3'-phosphate
  modified_base 20: mod_base = OTHER; note = 2'-O-methyluridine-3'-phosphate
  modified_base 21: mod_base = OTHER; note = 2'-O-methyladenosine-3'-phosphate attached to N-[tris(N-acetylgalactosamine-alkyl)-amidodecanoyl)]-4-hydr oxyprolinol Hyp-(N-acetylgalactosamine-alkyl)3
atatcttgtgcataaatgtta

SEQ ID NO: 3108 - RNA, 21 nt, synthetic construct
  misc_feature 1..21: note = Description of Artificial Sequence: Synthetic oligonucleotide
  source 1..21: mol_type = other RNA
  modified_base 1: mod_base = OTHER; note = 2'-O-methyladenosine-3'- phosphorothioate
  modified_base 2: mod_base = OTHER; note = 2'-O-methyladenosine-3'- phosphorothioate
  modified_base 3: mod_base = OTHER; note = 2'-O-methyladenosine-3'-phosphate
  modified_base 4: mod_base = OTHER; note = 2'-O-methylcytidine-3'-phosphate
  modified_base 5: mod_base = OTHER; note = 2'-O-methyladenosine-3'-phosphate
  modified_base 6: mod_base = OTHER; note = 2'-O-methylcytidine-3'-phosphate
  modified_base 7: mod_base = OTHER; note = 2'-fluorocytidine-3'-phosphate
  modified_base 8: mod_base = OTHER; note = 2'-O-methyladenosine-3'-phosphate
  modified_base 9: mod_base = OTHER; note = 2'-fluoroadenosine-3'-phosphate
  modified_base 10: mod_base = OTHER; note = 2'-fluoroadenosine-3'-phosphate
  modified_base 11: mod_base = OTHER; note = 2'-fluoroadenosine-3'-phosphate
  modified_base 12: mod_base = OTHER; note = 2'-O-methyladenosine-3'-phosphate
  modified_base 13: mod_base = OTHER; note = 2'-O-methyluridine-3'-phosphate
  modified_base 14: mod_base = OTHER; note = 2'-O-methyluridine-3'-phosphate
  modified_base 15: mod_base = OTHER; note = 2'-O-methylguanosine-3'-phosphate
  modified_base 16: mod_base = OTHER; note = 2'-O-methyluridine-3'-phosphate
  modified_base 17: mod_base = OTHER; note = 2'-O-methylcytidine-3'-phosphate
  modified_base 18: mod_base = OTHER; note = 2'-O-methyluridine-3'-phosphate
  modified_base 19: mod_base = OTHER; note = 2'-O-methylcytidine-3'-phosphate
  modified_base 20: mod_base = OTHER; note = 2'-O-methylcytidine-3'-phosphate
  modified_base 21: mod_base = OTHER; note = 2'-O-methyladenosine-3'-phosphate attached to N-[tris(N-acetylgalactosamine-alkyl)-amidodecanoyl)]-4-hydr oxyprolinol Hyp-(N-acetylgalactosamine-alkyl)3
aaacaccaaaaattgtctcca

SEQ ID NO: 3109 - RNA, 21 nt, synthetic construct
  misc_feature 1..21: note = Description of Artificial Sequence: Synthetic oligonucleotide
  source 1..21: mol_type = other RNA
  modified_base 1: mod_base = OTHER; note = 2'-O-methyluridine-3'-phosphorothioate
  modified_base 2: mod_base = OTHER; note = 2'-O-methyladenosine-3'- phosphorothioate
  modified_base 3: mod_base = OTHER; note = 2'-O-methyladenosine-3'-phosphate
  modified_base 4: mod_base = OTHER; note = 2'-O-methylcytidine-3'-phosphate
  modified_base 5: mod_base = OTHER; note = 2'-O-methylcytidine-3'-phosphate
  modified_base 6: mod_base = OTHER; note = 2'-O-methyluridine-3'-phosphate
  modified_base 7: mod_base = OTHER; note = 2'-fluoroguanosine-3'-phosphate
  modified_base 8: mod_base = OTHER; note = 2'-O-methylguanosine-3'-phosphate
  modified_base 9: mod_base = OTHER; note = 2'-fluorocytidine-3'-phosphate
  modified_base 10: mod_base = OTHER; note = 2'-fluorouridine-3'-phosphate
  modified_base 11: mod_base = OTHER; note = 2'-fluorocytidine-3'-phosphate
  modified_base 12: mod_base = OTHER; note = 2'-O-methylcytidine-3'-phosphate
  modified_base 13: mod_base = OTHER; note = 2'-O-methyladenosine-3'-phosphate
  modified_base 14: mod_base = OTHER; note = 2'-O-methylguanosine-3'-phosphate
  modified_base 15: mod_base = OTHER; note = 2'-O-methyluridine-3'-phosphate
  modified_base 16: mod_base = OTHER; note = 2'-O-methylguanosine-3'-phosphate
  modified_base 17: mod_base = OTHER; note = 2'-O-methyluridine-3'-phosphate
  modified_base 18: mod_base = OTHER; note = 2'-O-methylguanosine-3'-phosphate
  modified_base 19: mod_base = OTHER; note = 2'-O-methyluridine-3'-phosphate
  modified_base 20: mod_base = OTHER; note = 2'-O-methyladenosine-3'-phosphate
  modified_base 21: mod_base = OTHER; note = 2'-O-methyladenosine-3'-phosphate attached to N-[tris(N-acetylgalactosamine-alkyl)-amidodecanoyl)]-4-hydr oxyprolinol Hyp-(N-acetylgalactosamine-alkyl)3
taacctggctccagtgtgtaa

SEQ ID NO: 3110 - RNA, 21 nt, synthetic construct
  misc_feature 1..21: note = Description of Artificial Sequence: Synthetic oligonucleotide
  source 1..21: mol_type = other RNA
  modified_base 1: mod_base = OTHER; note = 2'-O-methyluridine-3'-phosphorothioate
  modified_base 2: mod_base = OTHER; note = 2'-O-methylguanosine-3'- phosphorothioate
  modified_base 3: mod_base = OTHER; note = 2'-O-methylcytidine-3'-phosphate
  modified_base 4: mod_base = OTHER; note = 2'-O-methyladenosine-3'-phosphate
  modified_base 5: mod_base = OTHER; note = 2'-O-methyluridine-3'-phosphate
  modified_base 6: mod_base = OTHER; note = 2'-O-methyladenosine-3'-phosphate
  modified_base 7: mod_base = OTHER; note = 2'-fluorouridine-3'-phosphate
  modified_base 8: mod_base = OTHER; note = 2'-O-methylcytidine-3'-phosphate
  modified_base 9: mod_base = OTHER; note = 2'-fluorouridine-3'-phosphate
  modified_base 10: mod_base = OTHER; note = 2'-fluorouridine-3'-phosphate
  modified_base 11: mod_base = OTHER; note = 2'-fluoroguanosine-3'-phosphate
  modified_base 12: mod_base = OTHER; note = 2'-O-methyluridine-3'-phosphate
  modified_base 13: mod_base = OTHER; note = 2'-O-methylguanosine-3'-phosphate
  modified_base 14: mod_base = OTHER; note = 2'-O-methylcytidine-3'-phosphate
  modified_base 15: mod_base = OTHER; note = 2'-O-methyladenosine-3'-phosphate
  modified_base 16: mod_base = OTHER; note = 2'-O-methyluridine-3'-phosphate
  modified_base 17: mod_base = OTHER; note = 2'-O-methyladenosine-3'-phosphate
  modified_base 18: mod_base = OTHER; note = 2'-O-methyladenosine-3'-phosphate
  modified_base 19: mod_base = OTHER; note = 2'-O-methyladenosine-3'-phosphate
  modified_base 20: mod_base = OTHER; note = 2'-O-methyluridine-3'-phosphate
  modified_base 21: mod_base = OTHER; note = 2'-O-methyladenosine-3'-phosphate attached to N-[tris(N-acetylgalactosamine-alkyl)-amidodecanoyl)]-4-hydr oxyprolinol Hyp-(N-acetylgalactosamine-alkyl)3
tgcatatcttgtgcataaata

SEQ ID NO: 3111 - RNA, 21 nt, synthetic construct
  misc_feature 1..21: note = Description of Artificial Sequence: Synthetic oligonucleotide
  source 1..21: mol_type = other RNA
  modified_base 1: mod_base = OTHER; note = 2'-O-methyladenosine-3'- phosphorothioate
  modified_base 2: mod_base = OTHER; note = 2'-O-methylcytidine-3'- phosphorothioate
  modified_base 3: mod_base = OTHER; note = 2'-O-methyladenosine-3'-phosphate
  modified_base 4: mod_base = OTHER; note = 2'-O-methyluridine-3'-phosphate
  modified_base 5: mod_base = OTHER; note = 2'-O-methyluridine-3'-phosphate
  modified_base 6: mod_base = OTHER; note = 2'-O-methylguanosine-3'-phosphate
  modified_base 7: mod_base = OTHER; note = 2'-fluorouridine-3'-phosphate
  modified_base 8: mod_base = OTHER; note = 2'-O-methylcytidine-3'-phosphate
  modified_base 9: mod_base = OTHER; note = 2'-fluoroadenosine-3'-phosphate
  modified_base 10: mod_base = OTHER; note = 2'-fluoroadenosine-3'-phosphate
  modified_base 11: mod_base = OTHER; note = 2'-fluoroguanosine-3'-phosphate
  modified_base 12: mod_base = OTHER; note = 2'-O-methyluridine-3'-phosphate
  modified_base 13: mod_base = OTHER; note = 2'-O-methyladenosine-3'-phosphate
  modified_base 14: mod_base = OTHER; note = 2'-O-methylcytidine-3'-phosphate
  modified_base 15: mod_base = OTHER; note = 2'-O-methyladenosine-3'-phosphate
  modified_base 16: mod_base = OTHER; note = 2'-O-methylguanosine-3'-phosphate
  modified_base 17: mod_base = OTHER; note = 2'-O-methyluridine-3'-phosphate
  modified_base 18: mod_base = OTHER; note = 2'-O-methylcytidine-3'-phosphate
  modified_base 19: mod_base = OTHER; note = 2'-O-methylcytidine-3'-phosphate
  modified_base 20: mod_base = OTHER; note = 2'-O-methyladenosine-3'-phosphate
  modified_base 21: mod_base = OTHER; note = 2'-O-methyladenosine-3'-phosphate attached to N-[tris(N-acetylgalactosamine-alkyl)-amidodecanoyl)]-4-hydr oxyprolinol Hyp-(N-acetylgalactosamine-alkyl)3
acattgtcaagtacagtccaa

SEQ ID NO: 3112 - RNA, 21 nt, synthetic construct
  misc_feature 1..21: note = Description of Artificial Sequence: Synthetic oligonucleotide
  source 1..21: mol_type = other RNA
  modified_base 1: mod_base = OTHER; note = 2'-O-methyladenosine-3'- phosphorothioate
  modified_base 2: mod_base = OTHER; note = 2'-O-methyladenosine-3'- phosphorothioate
  modified_base 3: mod_base = OTHER; note = 2'-O-methylcytidine-3'-phosphate
  modified_base 4: mod_base = OTHER; note = 2'-O-methylcytidine-3'-phosphate
  modified_base 5: mod_base = OTHER; note = 2'-O-methyluridine-3'-phosphate
  modified_base 6: mod_base = OTHER; note = 2'-O-methyluridine-3'-phosphate
  modified_base 7: mod_base = OTHER; note = 2'-fluoroguanosine-3'-phosphate
  modified_base 8: mod_base = OTHER; note = 2'-O-methyladenosine-3'-phosphate
  modified_base 9: mod_base = OTHER; note = 2'-fluoroadenosine-3'-phosphate
  modified_base 10: mod_base = OTHER; note = 2'-fluorocytidine-3'-phosphate
  modified_base 11: mod_base = OTHER; note = 2'-fluoroadenosine-3'-phosphate
  modified_base 12: mod_base = OTHER; note = 2'-O-methylguanosine-3'-phosphate
  modified_base 13: mod_base = OTHER; note = 2'-O-methyluridine-3'-phosphate
  modified_base 14: mod_base = OTHER; note = 2'-O-methylguanosine-3'-phosphate
  modified_base 15: mod_base = OTHER; note = 2'-O-methyladenosine-3'-phosphate
  modified_base 16: mod_base = OTHER; note = 2'-O-methyladenosine-3'-phosphate
  modified_base 17: mod_base = OTHER; note = 2'-O-methyladenosine-3'-phosphate
  modified_base 18: mod_base = OTHER; note = 2'-O-methyladenosine-3'-phosphate
  modified_base 19: mod_base = OTHER; note = 2'-O-methyladenosine-3'-phosphate
  modified_base 20: mod_base = OTHER; note = 2'-O-methyladenosine-3'-phosphate
  modified_base 21: mod_base = OTHER; note = 2'-O-methyladenosine-3'-phosphate attached to N-[tris(N-acetylgalactosamine-alkyl)-amidodecanoyl)]-4-hydr oxyprolinol Hyp-(N-acetylgalactosamine-alkyl)3
aaccttgaacagtgaaaaaaa

SEQ ID NO: 3113 - RNA, 21 nt, synthetic construct
  misc_feature 1..21: note = Description of Artificial Sequence: Synthetic oligonucleotide
  source 1..21: mol_type = other RNA
  modified_base 1: mod_base = OTHER; note = 2'-O-methylguanosine-3'- phosphorothioate
  modified_base 2: mod_base = OTHER; note = 2'-O-methyluridine-3'-phosphorothioate
  modified_base 3: mod_base = OTHER; note = 2'-O-methylguanosine-3'-phosphate
  modified_base 4: mod_base = OTHER; note = 2'-O-methyluridine-3'-phosphate
  modified_base 5: mod_base = OTHER; note = 2'-O-methylguanosine-3'-phosphate
  modified_base 6: mod_base = OTHER; note = 2'-O-methylcytidine-3'-phosphate
  modified_base 7: mod_base = OTHER; note = 2'-fluoroadenosine-3'-phosphate
  modified_base 8: mod_base = OTHER; note = 2'-O-methyluridine-3'-phosphate
  modified_base 9: mod_base = OTHER; note = 2'-fluorouridine-3'-phosphate
  modified_base 10: mod_base = OTHER; note = 2'-fluoroguanosine-3'-phosphate
  modified_base 11: mod_base = OTHER; note = 2'-fluorocytidine-3'-phosphate
  modified_base 12: mod_base = OTHER; note = 2'-O-methyladenosine-3'-phosphate
  modified_base 13: mod_base = OTHER; note = 2'-O-methyladenosine-3'-phosphate
  modified_base 14: mod_base = OTHER; note = 2'-O-methyluridine-3'-phosphate
  modified_base 15: mod_base = OTHER; note = 2'-O-methyladenosine-3'-phosphate
  modified_base 16: mod_base = OTHER; note = 2'-O-methyluridine-3'-phosphate
  modified_base 17: mod_base = OTHER; note = 2'-O-methyluridine-3'-phosphate
  modified_base 18: mod_base = OTHER; note = 2'-O-methyladenosine-3'-phosphate
  modified_base 19: mod_base = OTHER; note = 2'-O-methyluridine-3'-phosphate
  modified_base 20: mod_base = OTHER; note = 2'-O-methylguanosine-3'-phosphate
  modified_base 21: mod_base = OTHER; note = 2'-O-methyluridine-3'-phosphate attached to N-[tris(N-acetylgalactosamine-alkyl)-amidodecanoyl)]-4-hydr oxyprolinol Hyp-(N-acetylgalactosamine-alkyl)3
gtgtgcattgcaatattatgt

SEQ ID NO: 3114 - RNA, 21 nt, synthetic construct
  misc_feature 1..21: note = Description of Artificial Sequence: Synthetic oligonucleotide
  source 1..21: mol_type = other RNA
  modified_base 1: mod_base = OTHER; note = 2'-O-methylcytidine-3'- phosphorothioate
  modified_base 2: mod_base = OTHER; note = 2'-O-methylcytidine-3'- phosphorothioate
  modified_base 3: mod_base = OTHER; note = 2'-O-methyladenosine-3'-phosphate
  modified_base 4: mod_base = OTHER; note = 2'-O-methyladenosine-3'-phosphate
  modified_base 5: mod_base = OTHER; note = 2'-O-methyladenosine-3'-phosphate
  modified_base 6: mod_base = OTHER; note = 2'-O-methyladenosine-3'-phosphate
  modified_base 7: mod_base = OTHER; note = 2'-fluoroadenosine-3'-phosphate
  modified_base 8: mod_base = OTHER; note = 2'-O-methylcytidine-3'-phosphate
  modified_base 9: mod_base = OTHER; note = 2'-fluorocytidine-3'-phosphate
  modified_base 10: mod_base = OTHER; note = 2'-fluoroguanosine-3'-phosphate
  modified_base 11: mod_base = OTHER; note = 2'-fluoroadenosine-3'-phosphate
  modified_base 12: mod_base = OTHER; note = 2'-O-methylguanosine-3'-phosphate
  modified_base 13: mod_base = OTHER; note = 2'-O-methyluridine-3'-phosphate
  modified_base 14: mod_base = OTHER; note = 2'-O-methyladenosine-3'-phosphate
  modified_base 15: mod_base = OTHER; note = 2'-O-methyladenosine-3'-phosphate
  modified_base 16: mod_base = OTHER; note = 2'-O-methyluridine-3'-phosphate
  modified_base 17: mod_base = OTHER; note = 2'-O-methyluridine-3'-phosphate
  modified_base 18: mod_base = OTHER; note = 2'-O-methylguanosine-3'-phosphate
  modified_base 19: mod_base = OTHER; note = 2'-O-methylguanosine-3'-phosphate
  modified_base 20: mod_base = OTHER; note = 2'-O-methyladenosine-3'-phosphate
  modified_base 21: mod_base = OTHER; note = 2'-O-methyladenosine-3'-phosphate attached to N-[tris(N-acetylgalactosamine-alkyl)-amidodecanoyl)]-4-hydr oxyprolinol Hyp-(N-acetylgalactosamine-alkyl)3
ccaaaaaccgagtaattggaa

SEQ ID NO: 3115 - RNA, 21 nt, synthetic construct
  misc_feature 1..21: note = Description of Artificial Sequence: Synthetic oligonucleotide
  source 1..21: mol_type = other RNA
  modified_base 1: mod_base = OTHER; note = 2'-O-methylcytidine-3'- phosphorothioate
  modified_base 2: mod_base = OTHER; note = 2'-O-methyladenosine-3'- phosphorothioate
  modified_base 3: mod_base = OTHER; note = 2'-O-methyladenosine-3'-phosphate
  modified_base 4: mod_base = OTHER; note = 2'-O-methyladenosine-3'-phosphate
  modified_base 5: mod_base = OTHER; note = 2'-O-methyladenosine-3'-phosphate
  modified_base 6: mod_base = OTHER; note = 2'-O-methyladenosine-3'-phosphate
  modified_base 7: mod_base = OTHER; note = 2'-fluorocytidine-3'-phosphate
  modified_base 8: mod_base = OTHER; note = 2'-O-methylcytidine-3'-phosphate
  modified_base 9: mod_base = OTHER; note = 2'-fluoroguanosine-3'-phosphate
  modified_base 10: mod_base = OTHER; note = 2'-fluoroadenosine-3'-phosphate
  modified_base 11: mod_base = OTHER; note = 2'-fluoroguanosine-3'-phosphate
  modified_base 12: mod_base = OTHER; note = 2'-O-methyluridine-3'-phosphate
  modified_base 13: mod_base = OTHER; note = 2'-O-methyladenosine-3'-phosphate
  modified_base 14: mod_base = OTHER; note = 2'-O-methyladenosine-3'-phosphate
  modified_base 15: mod_base = OTHER; note = 2'-O-methyluridine-3'-phosphate
  modified_base 16: mod_base = OTHER; note = 2'-O-methyluridine-3'-phosphate
  modified_base 17: mod_base = OTHER; note = 2'-O-methylguanosine-3'-phosphate
  modified_base 18: mod_base = OTHER; note = 2'-O-methylguanosine-3'-phosphate
  modified_base 19: mod_base = OTHER; note = 2'-O-methyladenosine-3'-phosphate
  modified_base 20: mod_base = OTHER; note = 2'-O-methyladenosine-3'-phosphate
  modified_base 21: mod_base = OTHER; note = 2'-O-methyladenosine-3'-phosphate attached to N-[tris(N-acetylgalactosamine-alkyl)-amidodecanoyl)]-4-hydr oxyprolinol Hyp-(N-acetylgalactosamine-alkyl)3
caaaaaccgagtaattggaaa

SEQ ID NO: 3116 - RNA, 21 nt, synthetic construct
  misc_feature 1..21: note = Description of Artificial Sequence: Synthetic oligonucleotide
  source 1..21: mol_type = other RNA
  modified_base 1: mod_base = OTHER; note = 2'-O-methylcytidine-3'- phosphorothioate
  modified_base 2: mod_base = OTHER; note = 2'-O-methylcytidine-3'- phosphorothioate
  modified_base 3: mod_base = OTHER; note = 2'-O-methyladenosine-3'-phosphate
  modified_base 4: mod_base = OTHER; note = 2'-O-methyladenosine-3'-phosphate
  modified_base 5: mod_base = OTHER; note = 2'-O-methylguanosine-3'-phosphate
  modified_base 6: mod_base = OTHER; note = 2'-O-methyluridine-3'-phosphate
  modified_base 7: mod_base = OTHER; note = 2'-fluoroguanosine-3'-phosphate
  modified_base 8: mod_base = OTHER; note = 2'-O-methylguanosine-3'-phosphate
  modified_base 9: mod_base = OTHER; note = 2'-fluorouridine-3'-phosphate
  modified_base 10: mod_base = OTHER; note = 2'-fluoroadenosine-3'-phosphate
  modified_base 11: mod_base = OTHER; note = 2'-fluorocytidine-3'-phosphate
  modified_base 12: mod_base = OTHER; note = 2'-O-methyluridine-3'-phosphate
  modified_base 13: mod_base = OTHER; note = 2'-O-methyluridine-3'-phosphate
  modified_base 14: mod_base = OTHER; note = 2'-O-methylguanosine-3'-phosphate
  modified_base 15: mod_base = OTHER; note = 2'-O-methyluridine-3'-phosphate
  modified_base 16: mod_base = OTHER; note = 2'-O-methylguanosine-3'-phosphate
  modified_base 17: mod_base = OTHER; note = 2'-O-methyluridine-3'-phosphate
  modified_base 18: mod_base = OTHER; note = 2'-O-methyladenosine-3'-phosphate
  modified_base 19: mod_base = OTHER; note = 2'-O-methylguanosine-3'-phosphate
  modified_base 20: mod_base = OTHER; note = 2'-O-methyluridine-3'-phosphate
  modified_base 21: mod_base = OTHER; note = 2'-O-methyladenosine-3'-phosphate attached to N-[tris(N-acetylgalactosamine-alkyl)-amidodecanoyl)]-4-hydr oxyprolinol Hyp-(N-acetylgalactosamine-alkyl)3
ccaagtggtacttgtgtagta

SEQ ID NO: 3117 - RNA, 21 nt, synthetic construct
  misc_feature 1..21: note = Description of Artificial Sequence: Synthetic oligonucleotide
  source 1..21: mol_type = other RNA
  modified_base 1: mod_base = OTHER; note = 2'-O-methylcytidine-3'- phosphorothioate
  modified_base 2: mod_base = OTHER; note = 2'-O-methyladenosine-3'- phosphorothioate
  modified_base 3: mod_base = OTHER; note = 2'-O-methylguanosine-3'-phosphate
  modified_base 4: mod_base = OTHER; note = 2'-O-methylcytidine-3'-phosphate
  modified_base 5: mod_base = OTHER; note = 2'-O-methylguanosine-3'-phosphate
  modified_base 6: mod_base = OTHER; note = 2'-O-methyladenosine-3'-phosphate
  modified_base 7: mod_base = OTHER; note = 2'-fluoroadenosine-3'-phosphate
  modified_base 8: mod_base = OTHER; note = 2'-O-methyladenosine-3'-phosphate
  modified_base 9: mod_base = OTHER; note = 2'-fluorocytidine-3'-phosphate
  modified_base 10: mod_base = OTHER; note = 2'-fluoroguanosine-3'-phosphate
  modified_base 11: mod_base = OTHER; note = 2'-fluorouridine-3'-phosphate
  modified_base 12: mod_base = OTHER; note = 2'-O-methylguanosine-3'-phosphate
  modified_base 13: mod_base = OTHER; note = 2'-O-methyladenosine-3'-phosphate
  modified_base 14: mod_base = OTHER; note = 2'-O-methyladenosine-3'-phosphate
  modified_base 15: mod_base = OTHER; note = 2'-O-methylcytidine-3'-phosphate
  modified_base 16: mod_base = OTHER; note = 2'-O-methyladenosine-3'-phosphate
  modified_base 17: mod_base = OTHER; note = 2'-O-methyluridine-3'-phosphate
  modified_base 18: mod_base = OTHER; note = 2'-O-methylcytidine-3'-phosphate
  modified_base 19: mod_base = OTHER; note = 2'-O-methyluridine-3'-phosphate
  modified_base 20: mod_base = OTHER; note = 2'-O-methyluridine-3'-phosphate
  modified_base 21: mod_base = OTHER; note = 2'-O-methyladenosine-3'-phosphate attached to N-[tris(N-acetylgalactosamine-alkyl)-amidodecanoyl)]-4-hydr oxyprolinol Hyp-(N-acetylgalactosamine-alkyl)3
cagcgaaacgtgaacatctta

SEQ ID NO: 3118 - RNA, 21 nt, synthetic construct
  misc_feature 1..21: note = Description of Artificial Sequence: Synthetic oligonucleotide
  source 1..21: mol_type = other RNA
  modified_base 1: mod_base = OTHER; note = 2'-O-methyluridine-3'-phosphorothioate
  modified_base 2: mod_base = OTHER; note = 2'-O-methylguanosine-3'- phosphorothioate
  modified_base 3: mod_base = OTHER; note = 2'-O-methyladenosine-3'-phosphate
  modified_base 4: mod_base = OTHER; note = 2'-O-methyluridine-3'-phosphate
  modified_base 5: mod_base = OTHER; note = 2'-O-methyluridine-3'-phosphate
  modified_base 6: mod_base = OTHER; note = 2'-O-methylguanosine-3'-phosphate
  modified_base 7: mod_base = OTHER; note = 2'-fluorouridine-3'-phosphate
  modified_base 8: mod_base = OTHER; note = 2'-O-methylguanosine-3'-phosphate
  modified_base 9: mod_base = OTHER; note = 2'-fluoroadenosine-3'-phosphate
  modified_base 10: mod_base = OTHER; note = 2'-fluoroadenosine-3'-phosphate
  modified_base 11: mod_base = OTHER; note = 2'-fluorouridine-3'-phosphate
  modified_base 12: mod_base = OTHER; note = 2'-O-methylcytidine-3'-phosphate
  modified_base 13: mod_base = OTHER; note = 2'-O-methyluridine-3'-phosphate
  modified_base 14: mod_base = OTHER; note = 2'-O-methyluridine-3'-phosphate
  modified_base 15: mod_base = OTHER; note = 2'-O-methylcytidine-3'-phosphate
  modified_base 16: mod_base = OTHER; note = 2'-O-methyluridine-3'-phosphate
  modified_base 17: mod_base = OTHER; note = 2'-O-methyluridine-3'-phosphate
  modified_base 18: mod_base = OTHER; note = 2'-O-methyladenosine-3'-phosphate
  modified_base 19: mod_base = OTHER; note = 2'-O-methyladenosine-3'-phosphate
  modified_base 20: mod_base = OTHER; note = 2'-O-methylguanosine-3'-phosphate
  modified_base 21: mod_base = OTHER; note = 2'-O-methyladenosine-3'-phosphate attached to N-[tris(N-acetylgalactosamine-alkyl)-amidodecanoyl)]-4-hydr oxyprolinol Hyp-(N-acetylgalactosamine-alkyl)3
tgattgtgaatcttcttaaga

SEQ ID NO: 3119 - RNA, 21 nt, synthetic construct
  misc_feature 1..21: note = Description of Artificial Sequence: Synthetic oligonucleotide
  source 1..21: mol_type = other RNA
  modified_base 1: mod_base = OTHER; note = 2'-O-methylcytidine-3'- phosphorothioate
  modified_base 2: mod_base = OTHER; note = 2'-O-methyluridine-3'-phosphorothioate
  modified_base 3: mod_base = OTHER; note = 2'-O-methyluridine-3'-phosphate
  modified_base 4: mod_base = OTHER; note = 2'-O-methylcytidine-3'-phosphate
  modified_base 5: mod_base = OTHER; note = 2'-O-methyladenosine-3'-phosphate
  modified_base 6: mod_base = OTHER; note = 2'-O-methyladenosine-3'-phosphate
  modified_base 7: mod_base = OTHER; note = 2'-fluoroguanosine-3'-phosphate
  modified_base 8: mod_base = OTHER; note = 2'-O-methyluridine-3'-phosphate
  modified_base 9: mod_base = OTHER; note = 2'-fluorouridine-3'-phosphate
  modified_base 10: mod_base = OTHER; note = 2'-fluorocytidine-3'-phosphate
  modified_base 11: mod_base = OTHER; note = 2'-fluoroadenosine-3'-phosphate
  modified_base 12: mod_base = OTHER; note = 2'-O-methyluridine-3'-phosphate
  modified_base 13: mod_base = OTHER; note = 2'-O-methylcytidine-3'-phosphate
  modified_base 14: mod_base = OTHER; note = 2'-O-methyladenosine-3'-phosphate
  modified_base 15: mod_base = OTHER; note = 2'-O-methyluridine-3'-phosphate
  modified_base 16: mod_base = OTHER; note = 2'-O-methyluridine-3'-phosphate
  modified_base 17: mod_base = OTHER; note = 2'-O-methylcytidine-3'-phosphate
  modified_base 18: mod_base = OTHER; note = 2'-O-methylcytidine-3'-phosphate
  modified_base 19: mod_base = OTHER; note = 2'-O-methylcytidine-3'-phosphate
  modified_base 20: mod_base = OTHER; note = 2'-O-methyladenosine-3'-phosphate
  modified_base 21: mod_base = OTHER; note = 2'-O-methyladenosine-3'-phosphate attached to N-[tris(N-acetylgalactosamine-alkyl)-amidodecanoyl)]-4-hydr oxyprolinol Hyp-(N-acetylgalactosamine-alkyl)3
cttcaagttcatcattcccaa

SEQ ID NO: 3120 - RNA, 21 nt, synthetic construct
  misc_feature 1..21: note = Description of Artificial Sequence: Synthetic oligonucleotide
  source 1..21: mol_type = other RNA
  modified_base 1: mod_base = OTHER; note = 2'-O-methylguanosine-3'- phosphorothioate
  modified_base 2: mod_base = OTHER; note = 2'-O-methylguanosine-3'- phosphorothioate
  modified_base 3: mod_base = OTHER; note = 2'-O-methyladenosine-3'-phosphate
  modified_base 4: mod_base = OTHER; note = 2'-O-methylcytidine-3'-phosphate
  modified_base 5: mod_base = OTHER; note = 2'-O-methylcytidine-3'-phosphate
  modified_base 6: mod_base = OTHER; note = 2'-O-methyladenosine-3'-phosphate
  modified_base 7: mod_base = OTHER; note = 2'-fluoroguanosine-3'-phosphate
  modified_base 8: mod_base = OTHER; note = 2'-O-methylcytidine-3'-phosphate
  modified_base 9: mod_base = OTHER; note = 2'-fluorouridine-3'-phosphate
  modified_base 10: mod_base = OTHER; note = 2'-fluoroguanosine-3'-phosphate
  modified_base 11: mod_base = OTHER; note = 2'-fluoroadenosine-3'-phosphate
  modified_base 12: mod_base = OTHER; note = 2'-O-methyluridine-3'-phosphate
  modified_base 13: mod_base = OTHER; note = 2'-O-methyluridine-3'-phosphate
  modified_base 14: mod_base = OTHER; note = 2'-O-methylguanosine-3'-phosphate
  modified_base 15: mod_base = OTHER; note = 2'-O-methyluridine-3'-phosphate
  modified_base 16: mod_base = OTHER; note = 2'-O-methylguanosine-3'-phosphate
  modified_base 17: mod_base = OTHER; note = 2'-O-methyladenosine-3'-phosphate
  modified_base 18: mod_base = OTHER; note = 2'-O-methyladenosine-3'-phosphate
  modified_base 19: mod_base = OTHER; note = 2'-O-methyluridine-3'-phosphate
  modified_base 20: mod_base = OTHER; note = 2'-O-methylcytidine-3'-phosphate
  modified_base 21: mod_base = OTHER; note = 2'-O-methyluridine-3'-phosphate attached to N-[tris(N-acetylgalactosamine-alkyl)-amidodecanoyl)]-4-hydr oxyprolinol Hyp-(N-acetylgalactosamine-alkyl)3
ggaccagctgattgtgaatct

SEQ ID NO: 3121 - RNA, 21 nt, synthetic construct
  misc_feature 1..21: note = Description of Artificial Sequence: Synthetic oligonucleotide
  source 1..21: mol_type = other RNA
  modified_base 1: mod_base = OTHER; note = 2'-O-methyladenosine-3'- phosphorothioate
  modified_base 2: mod_base = OTHER; note = 2'-O-methyluridine-3'-phosphorothioate
  modified_base 3: mod_base = OTHER; note = 2'-O-methylguanosine-3'-phosphate
  modified_base 4: mod_base = OTHER; note = 2'-O-methylcytidine-3'-phosphate
  modified_base 5: mod_base = OTHER; note = 2'-O-methylcytidine-3'-phosphate
  modified_base 6: mod_base = OTHER; note = 2'-O-methyladenosine-3'-phosphate
  modified_base 7: mod_base = OTHER; note = 2'-fluoroadenosine-3'-phosphate
  modified_base 8: mod_base = OTHER; note = 2'-O-methyladenosine-3'-phosphate
  modified_base 9: mod_base = OTHER; note = 2'-fluorouridine-3'-phosphate
  modified_base 10: mod_base = OTHER; note = 2'-fluoroadenosine-3'-phosphate
  modified_base 11: mod_base = OTHER; note = 2'-fluoroadenosine-3'-phosphate
  modified_base 12: mod_base = OTHER; note = 2'-O-methyladenosine-3'-phosphate
  modified_base 13: mod_base = OTHER; note = 2'-O-methyladenosine-3'-phosphate
  modified_base 14: mod_base = OTHER; note = 2'-O-methylcytidine-3'-phosphate
  modified_base 15: mod_base = OTHER; note = 2'-O-methylcytidine-3'-phosphate
  modified_base 16: mod_base = OTHER; note = 2'-O-methyluridine-3'-phosphate
  modified_base 17: mod_base = OTHER; note = 2'-O-methyluridine-3'-phosphate
  modified_base 18: mod_base = OTHER; note = 2'-O-methylguanosine-3'-phosphate
  modified_base 19: mod_base = OTHER; note = 2'-O-methyladenosine-3'-phosphate
  modified_base 20: mod_base = OTHER; note = 2'-O-methyladenosine-3'-phosphate
  modified_base 21: mod_base = OTHER; note = 2'-O-methyladenosine-3'-phosphate attached to N-[tris(N-acetylgalactosamine-alkyl)-amidodecanoyl)]-4-hydr oxyprolinol Hyp-(N-acetylgalactosamine-alkyl)3
atgccaaataaaaccttgaaa

SEQ ID NO: 3122 - RNA, 23 nt, synthetic construct
  misc_feature 1..23: note = Description of Artificial Sequence: Synthetic oligonucleotide
  source 1..23: mol_type = other RNA
  modified_base 1: mod_base = OTHER; note = 2'-O-methyluridine-3'-phosphorothioate
  modified_base 2: mod_base = OTHER; note = 2'-fluorouridine -3'-phosphorothioate
  modified_base 3: mod_base = OTHER; note = 2'-O-methylguanosine-3'-phosphate
  modified_base 4: mod_base = OTHER; note = 2'-O-methylguanosine-3'-phosphate
  modified_base 5: mod_base = OTHER; note = 2'-O-methyladenosine-3'-phosphate
  modified_base 6: mod_base = OTHER; note = 2'-fluoroguanosine-3'-phosphate
  modified_base 7: mod_base = OTHER; note = 2'-O-methyladenosine-3'-phosphate
  modified_base 8: mod_base = OTHER; note = 2'-fluorocytidine-3'-phosphate
  modified_base 9: mod_base = OTHER; note = 2'-fluoroadenosine-3'-phosphate
  modified_base 10: mod_base = OTHER; note = 2'-O-methyladenosine-3'-phosphate
  modified_base 11: mod_base = OTHER; note = 2'-O-methyluridine-3'-phosphate
  modified_base 12: mod_base = OTHER; note = 2'-O-methyluridine-3'-phosphate
  modified_base 13: mod_base = OTHER; note = 2'-O-methyluridine-3'-phosphate
  modified_base 14: mod_base = OTHER; note = 2'-fluorouridine-3'-phosphate
  modified_base 15: mod_base = OTHER; note = 2'-O-methyluridine-3'-phosphate
  modified_base 16: mod_base = OTHER; note = 2'-fluoroguanosine-3'-phosphate
  modified_base 17: mod_base = OTHER; note = 2'-O-methylguanosine-3'-phosphate
  modified_base 18: mod_base = OTHER; note = 2'-O-methyluridine-3'-phosphate
  modified_base 19: mod_base = OTHER; note = 2'-O-methylguanosine-3'-phosphate
  modified_base 20: mod_base = OTHER; note = 2'-O-methyluridine-3'-phosphate
  modified_base 21: mod_base = OTHER; note = 2'-O-methyluridine-3'-phosphorothioate
  modified_base 22: mod_base = OTHER; note = 2'-O-methyluridine-3'-phosphorothioate
  modified_base 23: mod_base = OTHER; note = 2'-O-methyluridine-3'-phosphate
ttggagacaatttttggtgtttt

SEQ ID NO: 3123 - RNA, 23 nt, synthetic construct
  misc_feature 1..23: note = Description of Artificial Sequence: Synthetic oligonucleotide
  source 1..23: mol_type = other RNA
  modified_base 1: mod_base = OTHER; note = 2'-O-methyluridine-3'-phosphorothioate
  modified_base 2: mod_base = OTHER; note = 2'-fluorocytidine-3'-phosphorothioate
  modified_base 3: mod_base = OTHER; note = 2'-O-methyladenosine-3'-phosphate
  modified_base 4: mod_base = OTHER; note = 2'-O-methylcytidine-3'-phosphate
  modified_base 5: mod_base = OTHER; note = 2'-O-methyluridine-3'-phosphate
  modified_base 6: mod_base = OTHER; note = 2'-fluorouridine-3'-phosphate
  modified_base 7: mod_base = OTHER; note = 2'-O-methylcytidine-3'-phosphate
  modified_base 8: mod_base = OTHER; note = 2'-fluorocytidine-3'-phosphate
  modified_base 9: mod_base = OTHER; note = 2'-fluoroadenosine-3'-phosphate
  modified_base 10: mod_base = OTHER; note = 2'-O-methyladenosine-3'-phosphate
  modified_base 11: mod_base = OTHER; note = 2'-O-methyluridine-3'-phosphate
  modified_base 12: mod_base = OTHER; note = 2'-O-methyluridine-3'-phosphate
  modified_base 13: mod_base = OTHER; note = 2'-O-methyladenosine-3'-phosphate
  modified_base 14: mod_base = OTHER; note = 2'-fluorocytidine-3'-phosphate
  modified_base 15: mod_base = OTHER; note = 2'-O-methyluridine-3'-phosphate
  modified_base 16: mod_base = OTHER; note = 2'-fluorocytidine-3'-phosphate
  modified_base 17: mod_base = OTHER; note = 2'-O-methylguanosine-3'-phosphate
  modified_base 18: mod_base = OTHER; note = 2'-O-methylguanosine-3'-phosphate
  modified_base 19: mod_base = OTHER; note = 2'-O-methyluridine-3'-phosphate
  modified_base 20: mod_base = OTHER; note = 2'-O-methyluridine-3'-phosphate
  modified_base 21: mod_base = OTHER; note = 2'-O-methyluridine-3'-phosphorothioate
  modified_base 22: mod_base = OTHER; note = 2'-O-methyluridine-3'-phosphorothioate
  modified_base 23: mod_base = OTHER; note = 2'-O-methyluridine-3'-phosphate
tcacttccaattactcggttttt

SEQ ID NO: 3124 - RNA, 23 nt, synthetic construct
  misc_feature 1..23: note = Description of Artificial Sequence: Synthetic oligonucleotide
  source 1..23: mol_type = other RNA
  modified_base 1: mod_base = OTHER; note = 2'-O-methyluridine-3'-phosphorothioate
  modified_base 2: mod_base = OTHER; note = 2'-fluorouridine -3'-phosphorothioate
  modified_base 3: mod_base = OTHER; note = 2'-O-methyluridine-3'-phosphate
  modified_base 4: mod_base = OTHER; note = 2'-O-methyluridine-3'-phosphate
  modified_base 5: mod_base = OTHER; note = 2'-O-methylguanosine-3'-phosphate
  modified_base 6: mod_base = OTHER; note = 2'-fluoroguanosine-3'-phosphate
  modified_base 7: mod_base = OTHER; note = 2'-O-methylguanosine-3'-phosphate
  modified_base 8: mod_base = OTHER; note = 2'-fluoroadenosine-3'-phosphate
  modified_base 9: mod_base = OTHER; note = 2'-fluoroadenosine-3'-phosphate
  modified_base 10: mod_base = OTHER; note = 2'-O-methyladenosine-3'-phosphate
  modified_base 11: mod_base = OTHER; note = 2'-O-methylguanosine-3'-phosphate
  modified_base 12: mod_base = OTHER; note = 2'-O-methylcytidine-3'-phosphate
  modified_base 13: mod_base = OTHER; note = 2'-O-methylcytidine-3'-phosphate
  modified_base 14: mod_base = OTHER; note = 2'-fluoroadenosine-3'-phosphate
  modified_base 15: mod_base = OTHER; note = 2'-O-methylcytidine-3'-phosphate
  modified_base 16: mod_base = OTHER; note = 2'-fluorouridine-3'-phosphate
  modified_base 17: mod_base = OTHER; note = 2'-O-methylguanosine-3'-phosphate
  modified_base 18: mod_base = OTHER; note = 2'-O-methyladenosine-3'-phosphate
  modified_base 19: mod_base = OTHER; note = 2'-O-methyluridine-3'-phosphate
  modified_base 20: mod_base = OTHER; note = 2'-O-methyluridine-3'-phosphate
  modified_base 21: mod_base = OTHER; note = 2'-O-methyluridine-3'-phosphorothioate
  modified_base 22: mod_base = OTHER; note = 2'-O-methyluridine-3'-phosphorothioate
  modified_base 23: mod_base = OTHER; note = 2'-O-methylcytidine-3'-phosphate
ttttgggaaagccactgattttc

SEQ ID NO: 3125 - RNA, 23 nt, synthetic construct
  misc_feature 1..23: note = Description of Artificial Sequence: Synthetic oligonucleotide
  source 1..23: mol_type = other RNA
  modified_base 1: mod_base = OTHER; note = 2'-O-methyluridine-3'-phosphorothioate
  modified_base 2: mod_base = OTHER; note = 2'-fluorouridine -3'-phosphorothioate
  modified_base 3: mod_base = OTHER; note = 2'-O-methylguanosine-3'-phosphate
  modified_base 4: mod_base = OTHER; note = 2'-O-methyluridine-3'-phosphate
  modified_base 5: mod_base = OTHER; note = 2'-O-methyladenosine-3'-phosphate
  modified_base 6: mod_base = OTHER; note = 2'-fluorocytidine-3'-phosphate
  modified_base 7: mod_base = OTHER; note = 2'-O-methyluridine-3'-phosphate
  modified_base 8: mod_base = OTHER; note = 2'-fluorouridine-3'-phosphate
  modified_base 9: mod_base = OTHER; note = 2'-fluoroguanosine-3'-phosphate
  modified_base 10: mod_base = OTHER; note = 2'-O-methyladenosine-3'-phosphate
  modified_base 11: mod_base = OTHER; note = 2'-O-methylcytidine-3'-phosphate
  modified_base 12: mod_base = OTHER; note = 2'-O-methyladenosine-3'-phosphate
  modified_base 13: mod_base = OTHER; note = 2'-O-methyladenosine-3'-phosphate
  modified_base 14: mod_base = OTHER; note = 2'-fluorouridine-3'-phosphate
  modified_base 15: mod_base = OTHER; note = 2'-O-methylguanosine-3'-phosphate
  modified_base 16: mod_base = OTHER; note = 2'-fluorouridine-3'-phosphate
  modified_base 17: mod_base = OTHER; note = 2'-O-methyluridine-3'-phosphate
  modified_base 18: mod_base = OTHER; note = 2'-O-methylguanosine-3'-phosphate
  modified_base 19: mod_base = OTHER; note = 2'-O-methylguanosine-3'-phosphate
  modified_base 20: mod_base = OTHER; note = 2'-O-methylguanosine-3'-phosphate
  modified_base 21: mod_base = OTHER; note = 2'-O-methyladenosine-3'- phosphorothioate
  modified_base 22: mod_base = OTHER; note = 2'-O-methyladenosine-3'- phosphorothioate
  modified_base 23: mod_base = OTHER; note = 2'-O-methyluridine-3'-phosphate
ttgtacttgacaatgttgggaat

SEQ ID NO: 3126 - RNA, 23 nt, synthetic construct
  misc_feature 1..23: note = Description of Artificial Sequence: Synthetic oligonucleotide
  source 1..23: mol_type = other RNA
  modified_base 1: mod_base = OTHER; note = 2'-O-methyluridine-3'-phosphorothioate
  modified_base 2: mod_base = OTHER; note = 2'-fluoroadenosine-3'-phosphorothioate
  modified_base 3: mod_base = OTHER; note = 2'-O-methyluridine-3'-phosphate
  modified_base 4: mod_base = OTHER; note = 2'-O-methyluridine-3'-phosphate
  modified_base 5: mod_base = OTHER; note = 2'-O-methyladenosine-3'-phosphate
  modified_base 6: mod_base = OTHER; note = 2'-fluoroadenosine-3'-phosphate
  modified_base 7: mod_base = OTHER; note = 2'-O-methylguanosine-3'-phosphate
  modified_base 8: mod_base = OTHER; note = 2'-fluoroadenosine-3'-phosphate
  modified_base 9: mod_base = OTHER; note = 2'-fluorouridine-3'-phosphate
  modified_base 10: mod_base = OTHER; note = 2'-O-methyladenosine-3'-phosphate
  modified_base 11: mod_base = OTHER; note = 2'-O-methylcytidine-3'-phosphate
  modified_base 12: mod_base = OTHER; note = 2'-O-methyluridine-3'-phosphate
  modified_base 13: mod_base = OTHER; note = 2'-O-methylguanosine-3'-phosphate
  modified_base 14: mod_base = OTHER; note = 2'-fluoroadenosine-3'-phosphate
  modified_base 15: mod_base = OTHER; note = 2'-O-methyluridine-3'-phosphate
  modified_base 16: mod_base = OTHER; note = 2'-fluoroguanosine-3'-phosphate
  modified_base 17: mod_base = OTHER; note = 2'-O-methylguanosine-3'-phosphate
  modified_base 18: mod_base = OTHER; note = 2'-O-methylcytidine-3'-phosphate
  modified_base 19: mod_base = OTHER; note = 2'-O-methyladenosine-3'-phosphate
  modified_base 20: mod_base = OTHER; note = 2'-O-methylcytidine-3'-phosphate
  modified_base 21: mod_base = OTHER; note = 2'-O-methyladenosine-3'- phosphorothioate
  modified_base 22: mod_base = OTHER; note = 2'-O-methyladenosine-3'- phosphorothioate
  modified_base 23: mod_base = OTHER; note = 2'-O-methylguanosine-3'-phosphate
tattaagatactgatggcacaag

SEQ ID NO: 3127 - RNA, 23 nt, synthetic construct
  misc_feature 1..23: note = Description of Artificial Sequence: Synthetic oligonucleotide
  source 1..23: mol_type = other RNA
  modified_base 1: mod_base = OTHER; note = 2'-O-methyladenosine-3'- phosphorothioate
  modified_base 2: mod_base = OTHER; note = 2'-fluoroguanosine-3'-phosphorothioate
  modified_base 3: mod_base = OTHER; note = 2'-O-methyluridine-3'-phosphate
  modified_base 4: mod_base = OTHER; note = 2'-O-methylcytidine-3'-phosphate
  modified_base 5: mod_base = OTHER; note = 2'-O-methyluridine-3'-phosphate
  modified_base 6: mod_base = OTHER; note = 2'-fluorouridine-3'-phosphate
  modified_base 7: mod_base = OTHER; note = 2'-O-methyluridine-3'-phosphate
  modified_base 8: mod_base = OTHER; note = 2'-fluoroguanosine-3'-phosphate
  modified_base 9: mod_base = OTHER; note = 2'-fluorocytidine-3'-phosphate
  modified_base 10: mod_base = OTHER; note = 2'-O-methyluridine-3'-phosphate
  modified_base 11: mod_base = OTHER; note = 2'-O-methylguanosine-3'-phosphate
  modified_base 12: mod_base = OTHER; note = 2'-O-methylguanosine-3'-phosphate
  modified_base 13: mod_base = OTHER; note = 2'-O-methyladenosine-3'-phosphate
  modified_base 14: mod_base = OTHER; note = 2'-fluoroguanosine-3'-phosphate
  modified_base 15: mod_base = OTHER; note = 2'-O-methyladenosine-3'-phosphate
  modified_base 16: mod_base = OTHER; note = 2'-fluorocytidine-3'-phosphate
  modified_base 17: mod_base = OTHER; note = 2'-O-methyladenosine-3'-phosphate
  modified_base 18: mod_base = OTHER; note = 2'-O-methyladenosine-3'-phosphate
  modified_base 19: mod_base = OTHER; note = 2'-O-methyluridine-3'-phosphate
  modified_base 20: mod_base = OTHER; note = 2'-O-methyluridine-3'-phosphate
  modified_base 21: mod_base = OTHER; note = 2'-O-methyluridine-3'-phosphorothioate
  modified_base 22: mod_base = OTHER; note = 2'-O-methyluridine-3'-phosphorothioate
  modified_base 23: mod_base = OTHER; note = 2'-O-methyluridine-3'-phosphate
agtctttgctggagacaattttt

SEQ ID NO: 3128 - RNA, 23 nt, synthetic construct
  misc_feature 1..23: note = Description of Artificial Sequence: Synthetic oligonucleotide
  source 1..23: mol_type = other RNA
  modified_base 1: mod_base = OTHER; note = 2'-O-methyluridine-3'-phosphorothioate
  modified_base 2: mod_base = OTHER; note = 2'-fluorouridine -3'-phosphorothioate
  modified_base 3: mod_base = OTHER; note = 2'-O-methyluridine-3'-phosphate
  modified_base 4: mod_base = OTHER; note = 2'-O-methyluridine-3'-phosphate
  modified_base 5: mod_base = OTHER; note = 2'-O-methyluridine-3'-phosphate
  modified_base 6: mod_base = OTHER; note = 2'-fluorouridine-3'-phosphate
  modified_base 7: mod_base = OTHER; note = 2'-O-methyluridine-3'-phosphate
  modified_base 8: mod_base = OTHER; note = 2'-fluorouridine-3'-phosphate
  modified_base 9: mod_base = OTHER; note = 2'-fluorocytidine-3'-phosphate
  modified_base 10: mod_base = OTHER; note = 2'-O-methyladenosine-3'-phosphate
  modified_base 11: mod_base = OTHER; note = 2'-O-methylcytidine-3'-phosphate
  modified_base 12: mod_base = OTHER; note = 2'-O-methyluridine-3'-phosphate
  modified_base 13: mod_base = OTHER; note = 2'-O-methylguanosine-3'-phosphate
  modified_base 14: mod_base = OTHER; note = 2'-fluorouridine-3'-phosphate
  modified_base 15: mod_base = OTHER; note = 2'-O-methyluridine-3'-phosphate
  modified_base 16: mod_base = OTHER; note = 2'-fluorocytidine-3'-phosphate
  modified_base 17: mod_base = OTHER; note = 2'-O-methyladenosine-3'-phosphate
  modified_base 18: mod_base = OTHER; note = 2'-O-methyladenosine-3'-phosphate
  modified_base 19: mod_base = OTHER; note = 2'-O-methylguanosine-3'-phosphate
  modified_base 20: mod_base = OTHER; note = 2'-O-methylguanosine-3'-phosphate
  modified_base 21: mod_base = OTHER; note = 2'-O-methyluridine-3'-phosphorothioate
  modified_base 22: mod_base = OTHER; note = 2'-O-methyluridine-3'-phosphorothioate
  modified_base 23: mod_base = OTHER; note = 2'-O-methyluridine-3'-phosphate
ttttttttcactgttcaaggttt

SEQ ID NO: 3129 - RNA, 23 nt, synthetic construct
  misc_feature 1..23: note = Description of Artificial Sequence: Synthetic oligonucleotide
  source 1..23: mol_type = other RNA
  modified_base 1: mod_base = OTHER; note = 2'-O-methyluridine-3'-phosphorothioate
  modified_base 2: mod_base = OTHER; note = 2'-fluoroguanosine-3'-phosphorothioate
  modified_base 3: mod_base = OTHER; note = 2'-O-methyladenosine-3'-phosphate
  modified_base 4: mod_base = OTHER; note = 2'-O-methylguanosine-3'-phosphate
  modified_base 5: mod_base = OTHER; note = 2'-O-methyladenosine-3'-phosphate
  modified_base 6: mod_base = OTHER; note = 2'-fluorocytidine-3'-phosphate
  modified_base 7: mod_base = OTHER; note = 2'-O-methyladenosine-3'-phosphate
  modified_base 8: mod_base = OTHER; note = 2'-fluoroadenosine-3'-phosphate
  modified_base 9: mod_base = OTHER; note = 2'-fluorouridine-3'-phosphate
  modified_base 10: mod_base = OTHER; note = 2'-O-methyluridine-3'-phosphate
  modified_base 11: mod_base = OTHER; note = 2'-O-methyluridine-3'-phosphate
  modified_base 12: mod_base = OTHER; note = 2'-O-methyluridine-3'-phosphate
  modified_base 13: mod_base = OTHER; note = 2'-O-methyluridine-3'-phosphate
  modified_base 14: mod_base = OTHER; note = 2'-fluoroguanosine-3'-phosphate
  modified_base 15: mod_base = OTHER; note = 2'-O-methylguanosine-3'-phosphate
  modified_base 16: mod_base = OTHER; note = 2'-fluorouridine-3'-phosphate
  modified_base 17: mod_base = OTHER; note = 2'-O-methylguanosine-3'-phosphate
  modified_base 18: mod_base = OTHER; note = 2'-O-methyluridine-3'-phosphate
  modified_base 19: mod_base = OTHER; note = 2'-O-methyluridine-3'-phosphate
  modified_base 20: mod_base = OTHER; note = 2'-O-methyluridine-3'-phosphate
  modified_base 21: mod_base = OTHER; note = 2'-O-methyluridine-3'-phosphorothioate
  modified_base 22: mod_base = OTHER; note = 2'-O-methyladenosine-3'- phosphorothioate
  modified_base 23: mod_base = OTHER; note = 2'-O-methyladenosine-3'-phosphate
tgagacaatttttggtgttttaa

SEQ ID NO: 3130 - RNA, 23 nt, synthetic construct
  misc_feature 1..23: note = Description of Artificial Sequence: Synthetic oligonucleotide
  source 1..23: mol_type = other RNA
  modified_base 1: mod_base = OTHER; note = 2'-O-methyluridine-3'-phosphorothioate
  modified_base 2: mod_base = OTHER; note = 2'-fluorouridine -3'-phosphorothioate
  modified_base 3: mod_base = OTHER; note = 2'-O-methylguanosine-3'-phosphate
  modified_base 4: mod_base = OTHER; note = 2'-O-methylcytidine-3'-phosphate
  modified_base 5: mod_base = OTHER; note = 2'-O-methyluridine-3'-phosphate
  modified_base 6: mod_base = OTHER; note = 2'-fluoroguanosine-3'-phosphate
  modified_base 7: mod_base = OTHER; note = 2'-O-methylguanosine-3'-phosphate
  modified_base 8: mod_base = OTHER; note = 2'-fluoroadenosine-3'-phosphate
  modified_base 9: mod_base = OTHER; note = 2'-fluoroguanosine-3'-phosphate
  modified_base 10: mod_base = OTHER; note = 2'-O-methyladenosine-3'-phosphate
  modified_base 11: mod_base = OTHER; note = 2'-O-methylcytidine-3'-phosphate
  modified_base 12: mod_base = OTHER; note = 2'-O-methyladenosine-3'-phosphate
  modified_base 13: mod_base = OTHER; note = 2'-O-methyladenosine-3'-phosphate
  modified_base 14: mod_base = OTHER; note = 2'-fluorouridine-3'-phosphate
  modified_base 15: mod_base = OTHER; note = 2'-O-methyluridine-3'-phosphate
  modified_base 16: mod_base = OTHER; note = 2'-fluorouridine-3'-phosphate
  modified_base 17: mod_base = OTHER; note = 2'-O-methyluridine-3'-phosphate
  modified_base 18: mod_base = OTHER; note = 2'-O-methyluridine-3'-phosphate
  modified_base 19: mod_base = OTHER; note = 2'-O-methylguanosine-3'-phosphate
  modified_base 20: mod_base = OTHER; note = 2'-O-methylguanosine-3'-phosphate
  modified_base 21: mod_base = OTHER; note = 2'-O-methyluridine-3'-phosphorothioate
  modified_base 22: mod_base = OTHER; note = 2'-O-methylguanosine-3'- phosphorothioate
  modified_base 23: mod_base = OTHER; note = 2'-O-methyluridine-3'-phosphate
ttgctggagacaatttttggtgt

SEQ ID NO: 3131 - RNA, 23 nt, synthetic construct
  misc_feature 1..23: note = Description of Artificial Sequence: Synthetic oligonucleotide
  source 1..23: mol_type = other RNA
  modified_base 1: mod_base = OTHER; note = 2'-O-methyladenosine-3'- phosphorothioate
  modified_base 2: mod_base = OTHER; note = 2'-fluorouridine -3'-phosphorothioate
  modified_base 3: mod_base = OTHER; note = 2'-O-methylguanosine-3'-phosphate
  modified_base 4: mod_base = OTHER; note = 2'-O-methyluridine-3'-phosphate
  modified_base 5: mod_base = OTHER; note = 2'-O-methyluridine-3'-phosphate
  modified_base 6: mod_base = OTHER; note = 2'-fluoroguanosine-3'-phosphate
  modified_base 7: mod_base = OTHER; note = 2'-O-methylguanosine-3'-phosphate
  modified_base 8: mod_base = OTHER; note = 2'-fluoroguanosine-3'-phosphate
  modified_base 9: mod_base = OTHER; note = 2'-fluoroadenosine-3'-phosphate
  modified_base 10: mod_base = OTHER; note = 2'-O-methyladenosine-3'-phosphate
  modified_base 11: mod_base = OTHER; note = 2'-O-methyluridine-3'-phosphate
  modified_base 12: mod_base = OTHER; note = 2'-O-methylguanosine-3'-phosphate
  modified_base 13: mod_base = OTHER; note = 2'-O-methyladenosine-3'-phosphate
  modified_base 14: mod_base = OTHER; note = 2'-fluorouridine-3'-phosphate
  modified_base 15: mod_base = OTHER; note = 2'-O-methylguanosine-3'-phosphate
  modified_base 16: mod_base = OTHER; note = 2'-fluoroadenosine-3'-phosphate
  modified_base 17: mod_base = OTHER; note = 2'-O-methyladenosine-3'-phosphate
  modified_base 18: mod_base = OTHER; note = 2'-O-methylcytidine-3'-phosphate
  modified_base 19: mod_base = OTHER; note = 2'-O-methyluridine-3'-phosphate
  modified_base 20: mod_base = OTHER; note = 2'-O-methyluridine-3'-phosphate
  modified_base 21: mod_base = OTHER; note = 2'-O-methylguanosine-3'- phosphorothioate
  modified_base 22: mod_base = OTHER; note = 2'-O-methyladenosine-3'- phosphorothioate
  modified_base 23: mod_base = OTHER; note = 2'-O-methyladenosine-3'-phosphate
atgttgggaatgatgaacttgaa

SEQ ID NO: 3132 - RNA, 23 nt, synthetic construct
  misc_feature 1..23: note = Description of Artificial Sequence: Synthetic oligonucleotide
  source 1..23: mol_type = other RNA
  modified_base 1: mod_base = OTHER; note = 2'-O-methyluridine-3'-phosphorothioate
  modified_base 2: mod_base = OTHER; note = 2'-fluorouridine -3'-phosphorothioate
  modified_base 3: mod_base = OTHER; note = 2'-O-methyladenosine-3'-phosphate
  modified_base 4: mod_base = OTHER; note = 2'-O-methylcytidine-3'-phosphate
  modified_base 5: mod_base = OTHER; note = 2'-O-methyladenosine-3'-phosphate
  modified_base 6: mod_base = OTHER; note = 2'-fluorouridine-3'-phosphate
  modified_base 7: mod_base = OTHER; note = 2'-O-methylcytidine-3'-phosphate
  modified_base 8: mod_base = OTHER; note = 2'-fluorouridine-3'-phosphate
  modified_base 9: mod_base = OTHER; note = 2'-fluorocytidine-3'-phosphate
  modified_base 10: mod_base = OTHER; note = 2'-O-methyladenosine-3'-phosphate
  modified_base 11: mod_base = OTHER; note = 2'-O-methylcytidine-3'-phosphate
  modified_base 12: mod_base = OTHER; note = 2'-O-methyladenosine-3'-phosphate
  modified_base 13: mod_base = OTHER; note = 2'-O-methyluridine-3'-phosphate
  modified_base 14: mod_base = OTHER; note = 2'-fluoroadenosine-3'-phosphate
  modified_base 15: mod_base = OTHER; note = 2'-O-methyladenosine-3'-phosphate
  modified_base 16: mod_base = OTHER; note = 2'-fluorouridine-3'-phosphate
  modified_base 17: mod_base = OTHER; note = 2'-O-methyladenosine-3'-phosphate
  modified_base 18: mod_base = OTHER; note = 2'-O-methyluridine-3'-phosphate
  modified_base 19: mod_base = OTHER; note = 2'-O-methyluridine-3'-phosphate
  modified_base 20: mod_base = OTHER; note = 2'-O-methylguanosine-3'-phosphate
  modified_base 21: mod_base = OTHER; note = 2'-O-methylcytidine-3'- phosphorothioate
  modified_base 22: mod_base = OTHER; note = 2'-O-methyladenosine-3'- phosphorothioate
  modified_base 23: mod_base = OTHER; note = 2'-O-methyladenosine-3'-phosphate
ttacatctcacataatattgcaa

SEQ ID NO: 3133 - RNA, 23 nt, synthetic construct
  misc_feature 1..23: note = Description of Artificial Sequence: Synthetic oligonucleotide
  source 1..23: mol_type = other RNA
  modified_base 1: mod_base = OTHER; note = 2'-O-methyluridine-3'-phosphorothioate
  modified_base 2: mod_base = OTHER; note = 2'-fluoroguanosine-3'-phosphorothioate
  modified_base 3: mod_base = OTHER; note = 2'-O-methyladenosine-3'-phosphate
  modified_base 4: mod_base = OTHER; note = 2'-O-methylcytidine-3'-phosphate
  modified_base 5: mod_base = OTHER; note = 2'-O-methyluridine-3'-phosphate
  modified_base 6: mod_base = OTHER; note = 2'-fluorouridine-3'-phosphate
  modified_base 7: mod_base = OTHER; note = 2'-O-methyluridine-3'-phosphate
  modified_base 8: mod_base = OTHER; note = 2'-fluoroguanosine-3'-phosphate
  modified_base 9: mod_base = OTHER; note = 2'-fluoroadenosine-3'-phosphate
  modified_base 10: mod_base = OTHER; note = 2'-O-methyladenosine-3'-phosphate
  modified_base 11: mod_base = OTHER; note = 2'-O-methyluridine-3'-phosphate
  modified_base 12: mod_base = OTHER; note = 2'-O-methylcytidine-3'-phosphate
  modified_base 13: mod_base = OTHER; note = 2'-O-methyluridine-3'-phosphate
  modified_base 14: mod_base = OTHER; note = 2'-fluorouridine-3'-phosphate
  modified_base 15: mod_base = OTHER; note = 2'-O-methyluridine-3'-phosphate
  modified_base 16: mod_base = OTHER; note = 2'-fluorouridine-3'-phosphate
  modified_base 17: mod_base = OTHER; note = 2'-O-methylguanosine-3'-phosphate
  modified_base 18: mod_base = OTHER; note = 2'-O-methyladenosine-3'-phosphate
  modified_base 19: mod_base = OTHER; note = 2'-O-methylguanosine-3'-phosphate
  modified_base 20: mod_base = OTHER; note = 2'-O-methyladenosine-3'-phosphate
  modified_base 21: mod_base = OTHER; note = 2'-O-methylcytidine-3'- phosphorothioate
  modified_base 22: mod_base = OTHER; note = 2'-O-methylcytidine-3'- phosphorothioate
  modified_base 23: mod_base = OTHER; note = 2'-O-methylguanosine-3'-phosphate
tgactttgaatcttttgagaccg

SEQ ID NO: 3134 - RNA, 23 nt, synthetic construct
  misc_feature 1..23: note = Description of Artificial Sequence: Synthetic oligonucleotide
  source 1..23: mol_type = other RNA
  modified_base 1: mod_base = OTHER; note = 2'-O-methyluridine-3'-phosphorothioate
  modified_base 2: mod_base = OTHER; note = 2'-fluoroadenosine-3'-phosphorothioate
  modified_base 3: mod_base = OTHER; note = 2'-O-methylcytidine-3'-phosphate
  modified_base 4: mod_base = OTHER; note = 2'-O-methyluridine-3'-phosphate
  modified_base 5: mod_base = OTHER; note = 2'-O-methyluridine-3'-phosphate
  modified_base 6: mod_base = OTHER; note = 2'-fluoroguanosine-3'-phosphate
  modified_base 7: mod_base = OTHER; note = 2'-O-methyladenosine-3'-phosphate
  modified_base 8: mod_base = OTHER; note = 2'-fluorocytidine-3'-phosphate
  modified_base 9: mod_base = OTHER; note = 2'-fluoroadenosine-3'-phosphate
  modified_base 10: mod_base = OTHER; note = 2'-O-methyladenosine-3'-phosphate
  modified_base 11: mod_base = OTHER; note = 2'-O-methyluridine-3'-phosphate
  modified_base 12: mod_base = OTHER; note = 2'-O-methylguanosine-3'-phosphate
  modified_base 13: mod_base = OTHER; note = 2'-O-methyluridine-3'-phosphate
  modified_base 14: mod_base = OTHER; note = 2'-fluorouridine-3'-phosphate
  modified_base 15: mod_base = OTHER; note = 2'-O-methylguanosine-3'-phosphate
  modified_base 16: mod_base = OTHER; note = 2'-fluoroguanosine-3'-phosphate
  modified_base 17: mod_base = OTHER; note = 2'-O-methylguanosine-3'-phosphate
  modified_base 18: mod_base = OTHER; note = 2'-O-methyladenosine-3'-phosphate
  modified_base 19: mod_base = OTHER; note = 2'-O-methyladenosine-3'-phosphate
  modified_base 20: mod_base = OTHER; note = 2'-O-methyluridine-3'-phosphate
  modified_base 21: mod_base = OTHER; note = 2'-O-methylguanosine-3'- phosphorothioate
  modified_base 22: mod_base = OTHER; note = 2'-O-methyladenosine-3'- phosphorothioate
  modified_base 23: mod_base = OTHER; note = 2'-O-methyluridine-3'-phosphate
tacttgacaatgttgggaatgat

SEQ ID NO: 3135 - RNA, 23 nt, synthetic construct
  misc_feature 1..23: note = Description of Artificial Sequence: Synthetic oligonucleotide
  source 1..23: mol_type = other RNA
  modified_base 1: mod_base = OTHER; note = 2'-O-methyluridine-3'-phosphorothioate
  modified_base 2: mod_base = OTHER; note = 2'-fluorouridine -3'-phosphorothioate
  modified_base 3: mod_base = OTHER; note = 2'-O-methyluridine-3'-phosphate
  modified_base 4: mod_base = OTHER; note = 2'-O-methyluridine-3'-phosphate
  modified_base 5: mod_base = OTHER; note = 2'-O-methyluridine-3'-phosphate
  modified_base 6: mod_base = OTHER; note = 2'-fluorouridine-3'-phosphate
  modified_base 7: mod_base = OTHER; note = 2'-O-methylcytidine-3'-phosphate
  modified_base 8: mod_base = OTHER; note = 2'-fluoroadenosine-3'-phosphate
  modified_base 9: mod_base = OTHER; note = 2'-fluorocytidine-3'-phosphate
  modified_base 10: mod_base = OTHER; note = 2'-O-methyluridine-3'-phosphate
  modified_base 11: mod_base = OTHER; note = 2'-O-methylguanosine-3'-phosphate
  modified_base 12: mod_base = OTHER; note = 2'-O-methyluridine-3'-phosphate
  modified_base 13: mod_base = OTHER; note = 2'-O-methyluridine-3'-phosphate
  modified_base 14: mod_base = OTHER; note = 2'-fluorocytidine-3'-phosphate
  modified_base 15: mod_base = OTHER; note = 2'-O-methyladenosine-3'-phosphate
  modified_base 16: mod_base = OTHER; note = 2'-fluoroadenosine-3'-phosphate
  modified_base 17: mod_base = OTHER; note = 2'-O-methylguanosine-3'-phosphate
  modified_base 18: mod_base = OTHER; note = 2'-O-methylguanosine-3'-phosphate
  modified_base 19: mod_base = OTHER; note = 2'-O-methyluridine-3'-phosphate
  modified_base 20: mod_base = OTHER; note = 2'-O-methyluridine-3'-phosphate
  modified_base 21: mod_base = OTHER; note = 2'-O-methyluridine-3'-phosphorothioate
  modified_base 22: mod_base = OTHER; note = 2'-O-methyluridine-3'-phosphorothioate
  modified_base 23: mod_base = OTHER; note = 2'-O-methyladenosine-3'-phosphate
ttttttcactgttcaaggtttta

SEQ ID NO: 3136 - RNA, 23 nt, synthetic construct
  misc_feature 1..23: note = Description of Artificial Sequence: Synthetic oligonucleotide
  source 1..23: mol_type = other RNA
  modified_base 1: mod_base = OTHER; note = 2'-O-methyluridine-3'-phosphorothioate
  modified_base 2: mod_base = OTHER; note = 2'-fluorouridine -3'-phosphorothioate
  modified_base 3: mod_base = OTHER; note = 2'-O-methyluridine-3'-phosphate
  modified_base 4: mod_base = OTHER; note = 2'-O-methylguanosine-3'-phosphate
  modified_base 5: mod_base = OTHER; note = 2'-O-methylguanosine-3'-phosphate
  modified_base 6: mod_base = OTHER; note = 2'-fluoroadenosine-3'-phosphate
  modified_base 7: mod_base = OTHER; note = 2'-O-methylcytidine-3'-phosphate
  modified_base 8: mod_base = OTHER; note = 2'-fluorouridine-3'-phosphate
  modified_base 9: mod_base = OTHER; note = 2'-fluorouridine-3'-phosphate
  modified_base 10: mod_base = OTHER; note = 2'-O-methyluridine-3'-phosphate
  modified_base 11: mod_base = OTHER; note = 2'-O-methylguanosine-3'-phosphate
  modified_base 12: mod_base = OTHER; note = 2'-O-methyladenosine-3'-phosphate
  modified_base 13: mod_base = OTHER; note = 2'-O-methyladenosine-3'-phosphate
  modified_base 14: mod_base = OTHER; note = 2'-fluorouridine-3'-phosphate
  modified_base 15: mod_base = OTHER; note = 2'-O-methylcytidine-3'-phosphate
  modified_base 16: mod_base = OTHER; note = 2'-fluorouridine-3'-phosphate
  modified_base 17: mod_base = OTHER; note = 2'-O-methyluridine-3'-phosphate
  modified_base 18: mod_base = OTHER; note = 2'-O-methyluridine-3'-phosphate
  modified_base 19: mod_base = OTHER; note = 2'-O-methyluridine-3'-phosphate
  modified_base 20: mod_base = OTHER; note = 2'-O-methylguanosine-3'-phosphate
  modified_base 21: mod_base = OTHER; note = 2'-O-methyladenosine-3'- phosphorothioate
  modified_base 22: mod_base = OTHER; note = 2'-O-methylguanosine-3'- phosphorothioate
  modified_base 23: mod_base = OTHER; note = 2'-O-methyladenosine-3'-phosphate
tttggactttgaatcttttgaga

SEQ ID NO: 3137 - RNA, 23 nt, synthetic construct
  misc_feature 1..23: note = Description of Artificial Sequence: Synthetic oligonucleotide
  source 1..23: mol_type = other RNA
  modified_base 1: mod_base = OTHER; note = 2'-O-methyluridine-3'-phosphorothioate
  modified_base 2: mod_base = OTHER; note = 2'-fluoroadenosine-3'-phosphorothioate
  modified_base 3: mod_base = OTHER; note = 2'-O-methyladenosine-3'-phosphate
  modified_base 4: mod_base = OTHER; note = 2'-O-methyluridine-3'-phosphate
  modified_base 5: mod_base = OTHER; note = 2'-O-methylguanosine-3'-phosphate
  modified_base 6: mod_base = OTHER; note = 2'-fluoroadenosine-3'-phosphate
  modified_base 7: mod_base = OTHER; note = 2'-O-methyluridine-3'-phosphate
  modified_base 8: mod_base = OTHER; note = 2'-fluoroguanosine-3'-phosphate
  modified_base 9: mod_base = OTHER; note = 2'-fluoroadenosine-3'-phosphate
  modified_base 10: mod_base = OTHER; note = 2'-O-methyladenosine-3'-phosphate
  modified_base 11: mod_base = OTHER; note = 2'-O-methylcytidine-3'-phosphate
  modified_base 12: mod_base = OTHER; note = 2'-O-methyluridine-3'-phosphate
  modified_base 13: mod_base = OTHER; note = 2'-O-methyluridine-3'-phosphate
  modified_base 14: mod_base = OTHER; note = 2'-fluoroguanosine-3'-phosphate
  modified_base 15: mod_base = OTHER; note = 2'-O-methyladenosine-3'-phosphate
  modified_base 16: mod_base = OTHER; note = 2'-fluoroadenosine-3'-phosphate
  modified_base 17: mod_base = OTHER; note = 2'-O-methylguanosine-3'-phosphate
  modified_base 18: mod_base = OTHER; note = 2'-O-methyladenosine-3'-phosphate
  modified_base 19: mod_base = OTHER; note = 2'-O-methyluridine-3'-phosphate
  modified_base 20: mod_base = OTHER; note = 2'-O-methylguanosine-3'-phosphate
  modified_base 21: mod_base = OTHER; note = 2'-O-methyluridine-3'-phosphorothioate
  modified_base 22: mod_base = OTHER; note = 2'-O-methyluridine-3'-phosphorothioate
  modified_base 23: mod_base = OTHER; note = 2'-O-methylcytidine-3'-phosphate
taatgatgaacttgaagatgttc

SEQ ID NO: 3138 - RNA, 23 nt, synthetic construct
  misc_feature 1..23: note = Description of Artificial Sequence: Synthetic oligonucleotide
  source 1..23: mol_type = other RNA
  modified_base 1: mod_base = OTHER; note = 2'-O-methyladenosine-3'- phosphorothioate
  modified_base 2: mod_base = OTHER; note = 2'-fluoroadenosine-3'-phosphorothioate
  modified_base 3: mod_base = OTHER; note = 2'-O-methylguanosine-3'-phosphate
  modified_base 4: mod_base = OTHER; note = 2'-O-methyladenosine-3'-phosphate
  modified_base 5: mod_base = OTHER; note = 2'-O-methyladenosine-3'-phosphate
  modified_base 6: mod_base = OTHER; note = 2'-fluoroguanosine-3'-phosphate
  modified_base 7: mod_base = OTHER; note = 2'-O-methyladenosine-3'-phosphate
  modified_base 8: mod_base = OTHER; note = 2'-fluorouridine-3'-phosphate
  modified_base 9: mod_base = OTHER; note = 2'-fluorouridine-3'-phosphate
  modified_base 10: mod_base = OTHER; note = 2'-O-methylcytidine-3'-phosphate
  modified_base 11: mod_base = OTHER; note = 2'-O-methyladenosine-3'-phosphate
  modified_base 12: mod_base = OTHER; note = 2'-O-methylcytidine-3'-phosphate
  modified_base 13: mod_base = OTHER; note = 2'-O-methyladenosine-3'-phosphate
  modified_base 14: mod_base = OTHER; note = 2'-fluoroadenosine-3'-phosphate
  modified_base 15: mod_base = OTHER; note = 2'-O-methyluridine-3'-phosphate
  modified_base 16: mod_base = OTHER; note = 2'-fluorocytidine-3'-phosphate
  modified_base 17: mod_base = OTHER; note = 2'-O-methyladenosine-3'-phosphate
  modified_base 18: mod_base = OTHER; note = 2'-O-methylguanosine-3'-phosphate
  modified_base 19: mod_base = OTHER; note = 2'-O-methylcytidine-3'-phosphate
  modified_base 20: mod_base = OTHER; note = 2'-O-methyluridine-3'-phosphate
  modified_base 21: mod_base = OTHER; note = 2'-O-methylguanosine-3'- phosphorothioate
  modified_base 22: mod_base = OTHER; note = 2'-O-methylguanosine-3'- phosphorothioate
  modified_base 23: mod_base = OTHER; note = 2'-O-methyluridine-3'-phosphate
aagaagattcacaatcagctggt

SEQ ID NO: 3139 - RNA, 23 nt, synthetic construct
  misc_feature 1..23: note = Description of Artificial Sequence: Synthetic oligonucleotide
  source 1..23: mol_type = other RNA
  modified_base 1: mod_base = OTHER; note = 2'-O-methyluridine-3'-phosphorothioate
  modified_base 2: mod_base = OTHER; note = 2'-fluorouridine -3'-phosphorothioate
  modified_base 3: mod_base = OTHER; note = 2'-O-methylguanosine-3'-phosphate
  modified_base 4: mod_base = OTHER; note = 2'-O-methylguanosine-3'-phosphate
  modified_base 5: mod_base = OTHER; note = 2'-O-methyladenosine-3'-phosphate
  modified_base 6: mod_base = OTHER; note = 2'-fluorocytidine-3'-phosphate
  modified_base 7: mod_base = OTHER; note = 2'-O-methyluridine-3'-phosphate
  modified_base 8: mod_base = OTHER; note = 2'-fluorouridine-3'-phosphate
  modified_base 9: mod_base = OTHER; note = 2'-fluorouridine-3'-phosphate
  modified_base 10: mod_base = OTHER; note = 2'-O-methylguanosine-3'-phosphate
  modified_base 11: mod_base = OTHER; note = 2'-O-methyladenosine-3'-phosphate
  modified_base 12: mod_base = OTHER; note = 2'-O-methyladenosine-3'-phosphate
  modified_base 13: mod_base = OTHER; note = 2'-O-methyluridine-3'-phosphate
  modified_base 14: mod_base = OTHER; note = 2'-fluorocytidine-3'-phosphate
  modified_base 15: mod_base = OTHER; note = 2'-O-methyluridine-3'-phosphate
  modified_base 16: mod_base = OTHER; note = 2'-fluorouridine-3'-phosphate
  modified_base 17: mod_base = OTHER; note = 2'-O-methyluridine-3'-phosphate
  modified_base 18: mod_base = OTHER; note = 2'-O-methyluridine-3'-phosphate
  modified_base 19: mod_base = OTHER; note = 2'-O-methylguanosine-3'-phosphate
  modified_base 20: mod_base = OTHER; note = 2'-O-methyladenosine-3'-phosphate
  modified_base 21: mod_base = OTHER; note = 2'-O-methylguanosine-3'- phosphorothioate
  modified_base 22: mod_base = OTHER; note = 2'-O-methyladenosine-3'- phosphorothioate
  modified_base 23: mod_base = OTHER; note = 2'-O-methylcytidine-3'-phosphate
ttggactttgaatcttttgagac

SEQ ID NO: 3140 - RNA, 23 nt, synthetic construct
  misc_feature 1..23: note = Description of Artificial Sequence: Synthetic oligonucleotide
  source 1..23: mol_type = other RNA
  modified_base 1: mod_base = OTHER; note = 2'-O-methyluridine-3'-phosphorothioate
  modified_base 2: mod_base = OTHER; note = 2'-fluoroadenosine-3'-phosphorothioate
  modified_base 3: mod_base = OTHER; note = 2'-O-methylcytidine-3'-phosphate
  modified_base 4: mod_base = OTHER; note = 2'-O-methyluridine-3'-phosphate
  modified_base 5: mod_base = OTHER; note = 2'-O-methyluridine-3'-phosphate
  modified_base 6: mod_base = OTHER; note = 2'-fluorocytidine-3'-phosphate
  modified_base 7: mod_base = OTHER; note = 2'-O-methylcytidine-3'-phosphate
  modified_base 8: mod_base = OTHER; note = 2'-fluoroadenosine-3'-phosphate
  modified_base 9: mod_base = OTHER; note = 2'-fluoroadenosine-3'-phosphate
  modified_base 10: mod_base = OTHER; note = 2'-O-methyluridine-3'-phosphate
  modified_base 11: mod_base = OTHER; note = 2'-O-methyluridine-3'-phosphate
  modified_base 12: mod_base = OTHER; note = 2'-O-methyladenosine-3'-phosphate
  modified_base 13: mod_base = OTHER; note = 2'-O-methylcytidine-3'-phosphate
  modified_base 14: mod_base = OTHER; note = 2'-fluorouridine-3'-phosphate
  modified_base 15: mod_base = OTHER; note = 2'-O-methylcytidine-3'-phosphate
  modified_base 16: mod_base = OTHER; note = 2'-fluoroguanosine-3'-phosphate
  modified_base 17: mod_base = OTHER; note = 2'-O-methylguanosine-3'-phosphate
  modified_base 18: mod_base = OTHER; note = 2'-O-methyluridine-3'-phosphate
  modified_base 19: mod_base = OTHER; note = 2'-O-methyluridine-3'-phosphate
  modified_base 20: mod_base = OTHER; note = 2'-O-methyluridine-3'-phosphate
  modified_base 21: mod_base = OTHER; note = 2'-O-methyluridine-3'-phosphorothioate
  modified_base 22: mod_base = OTHER; note = 2'-O-methyluridine-3'-phosphorothioate
  modified_base 23: mod_base = OTHER; note = 2'-O-methylguanosine-3'-phosphate
tacttccaattactcggtttttg

SEQ ID NO: 3141 - RNA, 23 nt, synthetic construct
  misc_feature 1..23: note = Description of Artificial Sequence: Synthetic oligonucleotide
  source 1..23: mol_type = other RNA
  modified_base 1: mod_base = OTHER; note = 2'-O-methyluridine-3'-phosphorothioate
  modified_base 2: mod_base = OTHER; note = 2'-fluorouridine -3'-phosphorothioate
  modified_base 3: mod_base = OTHER; note = 2'-O-methyladenosine-3'-phosphate
  modified_base 4: mod_base = OTHER; note = 2'-O-methyluridine-3'-phosphate
  modified_base 5: mod_base = OTHER; note = 2'-O-methylguanosine-3'-phosphate
  modified_base 6: mod_base = OTHER; note = 2'-fluorocytidine-3'-phosphate
  modified_base 7: mod_base = OTHER; note = 2'-O-methyladenosine-3'-phosphate
  modified_base 8: mod_base = OTHER; note = 2'-fluorocytidine-3'-phosphate
  modified_base 9: mod_base = OTHER; note = 2'-fluoroadenosine-3'-phosphate
  modified_base 10: mod_base = OTHER; note = 2'-O-methyladenosine-3'-phosphate
  modified_base 11: mod_base = OTHER; note = 2'-O-methylguanosine-3'-phosphate
  modified_base 12: mod_base = OTHER; note = 2'-O-methyladenosine-3'-phosphate
  modified_base 13: mod_base = OTHER; note = 2'-O-methyluridine-3'-phosphate
  modified_base 14: mod_base = OTHER; note = 2'-fluoroadenosine-3'-phosphate
  modified_base 15: mod_base = OTHER; note = 2'-O-methyluridine-3'-phosphate
  modified_base 16: mod_base = OTHER; note = 2'-fluoroguanosine-3'-phosphate
  modified_base 17: mod_base = OTHER; note = 2'-O-methylcytidine-3'-phosphate
  modified_base 18: mod_base = OTHER; note = 2'-O-methyladenosine-3'-phosphate
  modified_base 19: mod_base = OTHER; note = 2'-O-methyluridine-3'-phosphate
  modified_base 20: mod_base = OTHER; note = 2'-O-methylcytidine-3'-phosphate
  modified_base 21: mod_base = OTHER; note = 2'-O-methyladenosine-3'- phosphorothioate
  modified_base 22: mod_base = OTHER; note = 2'-O-methyluridine-3'-phosphorothioate
  modified_base 23: mod_base = OTHER; note = 2'-O-methylguanosine-3'-phosphate
ttatgcacaagatatgcatcatg

SEQ ID NO: 3142 - RNA, 23 nt, synthetic construct
  misc_feature 1..23: note = Description of Artificial Sequence: Synthetic oligonucleotide
  source 1..23: mol_type = other RNA
  modified_base 1: mod_base = OTHER; note = 2'-O-methyluridine-3'-phosphorothioate
  modified_base 2: mod_base = OTHER; note = 2'-fluorocytidine-3'-phosphorothioate
  modified_base 3: mod_base = OTHER; note = 2'-O-methyluridine-3'-phosphate
  modified_base 4: mod_base = OTHER; note = 2'-O-methyluridine-3'-phosphate
  modified_base 5: mod_base = OTHER; note = 2'-O-methylcytidine-3'-phosphate
  modified_base 6: mod_base = OTHER; note = 2'-fluoroadenosine-3'-phosphate
  modified_base 7: mod_base = OTHER; note = 2'-O-methyluridine-3'-phosphate
  modified_base 8: mod_base = OTHER; note = 2'-fluorouridine-3'-phosphate
  modified_base 9: mod_base = OTHER; note = 2'-fluoroadenosine-3'-phosphate
  modified_base 10: mod_base = OTHER; note = 2'-O-methyladenosine-3'-phosphate
  modified_base 11: mod_base = OTHER; note = 2'-O-methylguanosine-3'-phosphate
  modified_base 12: mod_base = OTHER; note = 2'-O-methyladenosine-3'-phosphate
  modified_base 13: mod_base = OTHER; note = 2'-O-methyluridine-3'-phosphate
  modified_base 14: mod_base = OTHER; note = 2'-fluoroadenosine-3'-phosphate
  modified_base 15: mod_base = OTHER; note = 2'-O-methylcytidine-3'-phosphate
  modified_base 16: mod_base = OTHER; note = 2'-fluorouridine-3'-phosphate
  modified_base 17: mod_base = OTHER; note = 2'-O-methylguanosine-3'-phosphate
  modified_base 18: mod_base = OTHER; note = 2'-O-methyladenosine-3'-phosphate
  modified_base 19: mod_base = OTHER; note = 2'-O-methyluridine-3'-phosphate
  modified_base 20: mod_base = OTHER; note = 2'-O-methylguanosine-3'-phosphate
  modified_base 21: mod_base = OTHER; note = 2'-O-methylguanosine-3'- phosphorothioate
  modified_base 22: mod_base = OTHER; note = 2'-O-methylcytidine-3'- phosphorothioate
  modified_base 23: mod_base = OTHER; note = 2'-O-methyladenosine-3'-phosphate
tcttcattaagatactgatggca

SEQ ID NO: 3143 - RNA, 23 nt, synthetic construct
  misc_feature 1..23: note = Description of Artificial Sequence: Synthetic oligonucleotide
  source 1..23: mol_type = other RNA
  modified_base 1: mod_base = OTHER; note = 2'-O-methyluridine-3'-phosphorothioate
  modified_base 2: mod_base = OTHER; note = 2'-fluorouridine -3'-phosphorothioate
  modified_base 3: mod_base = OTHER; note = 2'-O-methyluridine-3'-phosphate
  modified_base 4: mod_base = OTHER; note = 2'-O-methyluridine-3'-phosphate
  modified_base 5: mod_base = OTHER; note = 2'-O-methyluridine-3'-phosphate
  modified_base 6: mod_base = OTHER; note = 2'-fluoroguanosine-3'-phosphate
  modified_base 7: mod_base = OTHER; note = 2'-O-methylguanosine-3'-phosphate
  modified_base 8: mod_base = OTHER; note = 2'-fluoroguanosine-3'-phosphate
  modified_base 9: mod_base = OTHER; note = 2'-fluoroadenosine-3'-phosphate
  modified_base 10: mod_base = OTHER; note = 2'-O-methyladenosine-3'-phosphate
  modified_base 11: mod_base = OTHER; note = 2'-O-methyladenosine-3'-phosphate
  modified_base 12: mod_base = OTHER; note = 2'-O-methylguanosine-3'-phosphate
  modified_base 13: mod_base = OTHER; note = 2'-O-methylcytidine-3'-phosphate
  modified_base 14: mod_base = OTHER; note = 2'-fluorocytidine-3'-phosphate
  modified_base 15: mod_base = OTHER; note = 2'-O-methyladenosine-3'-phosphate
  modified_base 16: mod_base = OTHER; note = 2'-fluorocytidine-3'-phosphate
  modified_base 17: mod_base = OTHER; note = 2'-O-methyluridine-3'-phosphate
  modified_base 18: mod_base = OTHER; note = 2'-O-methylguanosine-3'-phosphate
  modified_base 19: mod_base = OTHER; note = 2'-O-methyladenosine-3'-phosphate
  modified_base 20: mod_base = OTHER; note = 2'-O-methyluridine-3'-phosphate
  modified_base 21: mod_base = OTHER; note = 2'-O-methyluridine-3'-phosphorothioate
  modified_base 22: mod_base = OTHER; note = 2'-O-methyluridine-3'-phosphorothioate
  modified_base 23: mod_base = OTHER; note = 2'-O-methyluridine-3'-phosphate
tttttgggaaagccactgatttt

SEQ ID NO: 3144 - RNA, 23 nt, synthetic construct
  misc_feature 1..23: note = Description of Artificial Sequence: Synthetic oligonucleotide
  source 1..23: mol_type = other RNA
  modified_base 1: mod_base = OTHER; note = 2'-O-methyladenosine-3'- phosphorothioate
  modified_base 2: mod_base = OTHER; note = 2'-fluoroguanosine-3'-phosphorothioate
  modified_base 3: mod_base = OTHER; note = 2'-O-methyladenosine-3'-phosphate
  modified_base 4: mod_base = OTHER; note = 2'-O-methylcytidine-3'-phosphate
  modified_base 5: mod_base = OTHER; note = 2'-O-methyladenosine-3'-phosphate
  modified_base 6: mod_base = OTHER; note = 2'-fluoroadenosine-3'-phosphate
  modified_base 7: mod_base = OTHER; note = 2'-O-methyluridine-3'-phosphate
  modified_base 8: mod_base = OTHER; note = 2'-fluorouridine-3'-phosphate
  modified_base 9: mod_base = OTHER; note = 2'-fluorouridine-3'-phosphate
  modified_base 10: mod_base = OTHER; note = 2'-O-methyluridine-3'-phosphate
  modified_base 11: mod_base = OTHER; note = 2'-O-methyluridine-3'-phosphate
  modified_base 12: mod_base = OTHER; note = 2'-O-methylguanosine-3'-phosphate
  modified_base 13: mod_base = OTHER; note = 2'-O-methylguanosine-3'-phosphate
  modified_base 14: mod_base = OTHER; note = 2'-fluorouridine-3'-phosphate
  modified_base 15: mod_base = OTHER; note = 2'-O-methylguanosine-3'-phosphate
  modified_base 16: mod_base = OTHER; note = 2'-fluorouridine-3'-phosphate
  modified_base 17: mod_base = OTHER; note = 2'-O-methyluridine-3'-phosphate
  modified_base 18: mod_base = OTHER; note = 2'-O-methyluridine-3'-phosphate
  modified_base 19: mod_base = OTHER; note = 2'-O-methyluridine-3'-phosphate
  modified_base 20: mod_base = OTHER; note = 2'-O-methyladenosine-3'-phosphate
  modified_base 21: mod_base = OTHER; note = 2'-O-methyladenosine-3'- phosphorothioate
  modified_base 22: mod_base = OTHER; note = 2'-O-methylguanosine-3'- phosphorothioate
  modified_base 23: mod_base = OTHER; note = 2'-O-methylguanosine-3'-phosphate
agacaatttttggtgttttaagg

SEQ ID NO: 3145 - RNA, 23 nt, synthetic construct
  misc_feature 1..23: note = Description of Artificial Sequence: Synthetic oligonucleotide
  source 1..23: mol_type = other RNA
  modified_base 1: mod_base = OTHER; note = 2'-O-methyluridine-3'-phosphorothioate
  modified_base 2: mod_base = OTHER; note = 2'-fluorouridine -3'-phosphorothioate
  modified_base 3: mod_base = OTHER; note = 2'-O-methyluridine-3'-phosphate
  modified_base 4: mod_base = OTHER; note = 2'-O-methyladenosine-3'-phosphate
  modified_base 5: mod_base = OTHER; note = 2'-O-methyladenosine-3'-phosphate
  modified_base 6: mod_base = OTHER; note = 2'-fluoroguanosine-3'-phosphate
  modified_base 7: mod_base = OTHER; note = 2'-O-methyladenosine-3'-phosphate
  modified_base 8: mod_base = OTHER; note = 2'-fluoroadenosine-3'-phosphate
  modified_base 9: mod_base = OTHER; note = 2'-fluoroguanosine-3'-phosphate
  modified_base 10: mod_base = OTHER; note = 2'-O-methyladenosine-3'-phosphate
  modified_base 11: mod_base = OTHER; note = 2'-O-methyluridine-3'-phosphate
  modified_base 12: mod_base = OTHER; note = 2'-O-methyluridine-3'-phosphate
  modified_base 13: mod_base = OTHER; note = 2'-O-methylcytidine-3'-phosphate
  modified_base 14: mod_base = OTHER; note = 2'-fluoroadenosine-3'-phosphate
  modified_base 15: mod_base = OTHER; note = 2'-O-methylcytidine-3'-phosphate
  modified_base 16: mod_base = OTHER; note = 2'-fluoroadenosine-3'-phosphate
  modified_base 17: mod_base = OTHER; note = 2'-O-methyladenosine-3'-phosphate
  modified_base 18: mod_base = OTHER; note = 2'-O-methyluridine-3'-phosphate
  modified_base 19: mod_base = OTHER; note = 2'-O-methylcytidine-3'-phosphate
  modified_base 20: mod_base = OTHER; note = 2'-O-methyladenosine-3'-phosphate
  modified_base 21: mod_base = OTHER; note = 2'-O-methylguanosine-3'- phosphorothioate
  modified_base 22: mod_base = OTHER; note = 2'-O-methylcytidine-3'- phosphorothioate
  modified_base 23: mod_base = OTHER; note = 2'-O-methyluridine-3'-phosphate
tttaagaagattcacaatcagct

SEQ ID NO: 3146 - RNA, 23 nt, synthetic construct
  misc_feature 1..23: note = Description of Artificial Sequence: Synthetic oligonucleotide
  source 1..23: mol_type = other RNA
  modified_base 1: mod_base = OTHER; note = 2'-O-methyluridine-3'-phosphorothioate
  modified_base 2: mod_base = OTHER; note = 2'-fluorouridine -3'-phosphorothioate
  modified_base 3: mod_base = OTHER; note = 2'-O-methyluridine-3'-phosphate
  modified_base 4: mod_base = OTHER; note = 2'-O-methylcytidine-3'-phosphate
  modified_base 5: mod_base = OTHER; note = 2'-O-methyladenosine-3'-phosphate
  modified_base 6: mod_base = OTHER; note = 2'-fluorocytidine-3'-phosphate
  modified_base 7: mod_base = OTHER; note = 2'-O-methyluridine-3'-phosphate
  modified_base 8: mod_base = OTHER; note = 2'-fluoroguanosine-3'-phosphate
  modified_base 9: mod_base = OTHER; note = 2'-fluorouridine-3'-phosphate
  modified_base 10: mod_base = OTHER; note = 2'-O-methyluridine-3'-phosphate
  modified_base 11: mod_base = OTHER; note = 2'-O-methylcytidine-3'-phosphate
  modified_base 12: mod_base = OTHER; note = 2'-O-methyladenosine-3'-phosphate
  modified_base 13: mod_base = OTHER; note = 2'-O-methyladenosine-3'-phosphate
  modified_base 14: mod_base = OTHER; note = 2'-fluoroguanosine-3'-phosphate
  modified_base 15: mod_base = OTHER; note = 2'-O-methylguanosine-3'-phosphate
  modified_base 16: mod_base = OTHER; note = 2'-fluorouridine-3'-phosphate
  modified_base 17: mod_base = OTHER; note = 2'-O-methyluridine-3'-phosphate
  modified_base 18: mod_base = OTHER; note = 2'-O-methyluridine-3'-phosphate
  modified_base 19: mod_base = OTHER; note = 2'-O-methyluridine-3'-phosphate
  modified_base 20: mod_base = OTHER; note = 2'-O-methyladenosine-3'-phosphate
  modified_base 21: mod_base = OTHER; note = 2'-O-methyluridine-3'-phosphorothioate
  modified_base 22: mod_base = OTHER; note = 2'-O-methyluridine-3'-phosphorothioate
  modified_base 23: mod_base = OTHER; note = 2'-O-methyluridine-3'-phosphate
tttcactgttcaaggttttattt

SEQ ID NO: 3147 - RNA, 23 nt, synthetic construct
  misc_feature 1..23: note = Description of Artificial Sequence: Synthetic oligonucleotide
  source 1..23: mol_type = other RNA
  modified_base 1: mod_base = OTHER; note = 2'-O-methyluridine-3'-phosphorothioate
  modified_base 2: mod_base = OTHER; note = 2'-fluoroguanosine-3'-phosphorothioate
  modified_base 3: mod_base = OTHER; note = 2'-O-methyluridine-3'-phosphate
  modified_base 4: mod_base = OTHER; note = 2'-O-methyluridine-3'-phosphate
  modified_base 5: mod_base = OTHER; note = 2'-O-methyluridine-3'-phosphate
  modified_base 6: mod_base = OTHER; note = 2'-fluorouridine-3'-phosphate
  modified_base 7: mod_base = OTHER; note = 2'-O-methyladenosine-3'-phosphate
  modified_base 8: mod_base = OTHER; note = 2'-fluorouridine-3'-phosphate
  modified_base 9: mod_base = OTHER; note = 2'-fluorouridine-3'-phosphate
  modified_base 10: mod_base = OTHER; note = 2'-O-methyluridine-3'-phosphate
  modified_base 11: mod_base = OTHER; note = 2'-O-methylguanosine-3'-phosphate
  modified_base 12: mod_base = OTHER; note = 2'-O-methylguanosine-3'-phosphate
  modified_base 13: mod_base = OTHER; note = 2'-O-methylcytidine-3'-phosphate
  modified_base 14: mod_base = OTHER; note = 2'-fluoroadenosine-3'-phosphate
  modified_base 15: mod_base = OTHER; note = 2'-O-methyluridine-3'-phosphate
  modified_base 16: mod_base = OTHER; note = 2'-fluoroguanosine-3'-phosphate
  modified_base 17: mod_base = OTHER; note = 2'-O-methyladenosine-3'-phosphate
  modified_base 18: mod_base = OTHER; note = 2'-O-methylcytidine-3'-phosphate
  modified_base 19: mod_base = OTHER; note = 2'-O-methyladenosine-3'-phosphate
  modified_base 20: mod_base = OTHER; note = 2'-O-methylcytidine-3'-phosphate
  modified_base 21: mod_base = OTHER; note = 2'-O-methyluridine-3'-phosphorothioate
  modified_base 22: mod_base = OTHER; note = 2'-O-methyluridine-3'-phosphorothioate
  modified_base 23: mod_base = OTHER; note = 2'-O-methylguanosine-3'-phosphate
tgttttatttggcatgacacttg

SEQ ID NO: 3148 - RNA, 23 nt, synthetic construct
  misc_feature 1..23: note = Description of Artificial Sequence: Synthetic oligonucleotide
  source 1..23: mol_type = other RNA
  modified_base 1: mod_base = OTHER; note = 2'-O-methyluridine-3'-phosphorothioate
  modified_base 2: mod_base = OTHER; note = 2'-fluorocytidine-3'-phosphorothioate
  modified_base 3: mod_base = OTHER; note = 2'-O-methyluridine-3'-phosphate
  modified_base 4: mod_base = OTHER; note = 2'-O-methylguanosine-3'-phosphate
  modified_base 5: mod_base = OTHER; note = 2'-O-methylguanosine-3'-phosphate
  modified_base 6: mod_base = OTHER; note = 2'-fluoroadenosine-3'-phosphate
  modified_base 7: mod_base = OTHER; note = 2'-O-methylguanosine-3'-phosphate
  modified_base 8: mod_base = OTHER; note = 2'-fluoroadenosine-3'-phosphate
  modified_base 9: mod_base = OTHER; note = 2'-fluorocytidine-3'-phosphate
  modified_base 10: mod_base = OTHER; note = 2'-O-methyladenosine-3'-phosphate
  modified_base 11: mod_base = OTHER; note = 2'-O-methyladenosine-3'-phosphate
  modified_base 12: mod_base = OTHER; note = 2'-O-methyluridine-3'-phosphate
  modified_base 13: mod_base = OTHER; note = 2'-O-methyluridine-3'-phosphate
  modified_base 14: mod_base = OTHER; note = 2'-fluorouridine-3'-phosphate
  modified_base 15: mod_base = OTHER; note = 2'-O-methyluridine-3'-phosphate
  modified_base 16: mod_base = OTHER; note = 2'-fluorouridine-3'-phosphate
  modified_base 17: mod_base = OTHER; note = 2'-O-methylguanosine-3'-phosphate
  modified_base 18: mod_base = OTHER; note = 2'-O-methylguanosine-3'-phosphate
  modified_base 19: mod_base = OTHER; note = 2'-O-methyluridine-3'-phosphate
  modified_base 20: mod_base = OTHER; note = 2'-O-methylguanosine-3'-phosphate
  modified_base 21: mod_base = OTHER; note = 2'-O-methyluridine-3'-phosphorothioate
  modified_base 22: mod_base = OTHER; note = 2'-O-methyluridine-3'-phosphorothioate
  modified_base 23: mod_base = OTHER; note = 2'-O-methyluridine-3'-phosphate
tctggagacaatttttggtgttt

SEQ ID NO: 3149 - RNA, 23 nt, synthetic construct
  misc_feature 1..23: note = Description of Artificial Sequence: Synthetic oligonucleotide
  source 1..23: mol_type = other RNA
  modified_base 1: mod_base = OTHER; note = 2'-O-methyluridine-3'-phosphorothioate
  modified_base 2: mod_base = OTHER; note = 2'-fluorocytidine-3'-phosphorothioate
  modified_base 3: mod_base = OTHER; note = 2'-O-methyluridine-3'-phosphate
  modified_base 4: mod_base = OTHER; note = 2'-O-methylcytidine-3'-phosphate
  modified_base 5: mod_base = OTHER; note = 2'-O-methyladenosine-3'-phosphate
  modified_base 6: mod_base = OTHER; note = 2'-fluorocytidine-3'-phosphate
  modified_base 7: mod_base = OTHER; note = 2'-O-methyladenosine-3'-phosphate
  modified_base 8: mod_base = OTHER; note = 2'-fluorouridine-3'-phosphate
  modified_base 9: mod_base = OTHER; note = 2'-fluoroadenosine-3'-phosphate
  modified_base 10: mod_base = OTHER; note = 2'-O-methyladenosine-3'-phosphate
  modified_base 11: mod_base = OTHER; note = 2'-O-methyluridine-3'-phosphate
  modified_base 12: mod_base = OTHER; note = 2'-O-methyladenosine-3'-phosphate
  modified_base 13: mod_base = OTHER; note = 2'-O-methyluridine-3'-phosphate
  modified_base 14: mod_base = OTHER; note = 2'-fluorouridine-3'-phosphate
  modified_base 15: mod_base = OTHER; note = 2'-O-methylguanosine-3'-phosphate
  modified_base 16: mod_base = OTHER; note = 2'-fluorocytidine-3'-phosphate
  modified_base 17: mod_base = OTHER; note = 2'-O-methyladenosine-3'-phosphate
  modified_base 18: mod_base = OTHER; note = 2'-O-methyladenosine-3'-phosphate
  modified_base 19: mod_base = OTHER; note = 2'-O-methyluridine-3'-phosphate
  modified_base 20: mod_base = OTHER; note = 2'-O-methylguanosine-3'-phosphate
  modified_base 21: mod_base = OTHER; note = 2'-O-methylcytidine-3'- phosphorothioate
  modified_base 22: mod_base = OTHER; note = 2'-O-methyladenosine-3'- phosphorothioate
  modified_base 23: mod_base = OTHER; note = 2'-O-methylcytidine-3'-phosphate
tctcacataatattgcaatgcac

SEQ ID NO: 3150 - RNA, 23 nt, synthetic construct
  misc_feature 1..23: note = Description of Artificial Sequence: Synthetic oligonucleotide
  source 1..23: mol_type = other RNA
  modified_base 1: mod_base = OTHER; note = 2'-O-methyluridine-3'-phosphorothioate
  modified_base 2: mod_base = OTHER; note = 2'-fluoroadenosine-3'-phosphorothioate
  modified_base 3: mod_base = OTHER; note = 2'-O-methyladenosine-3'-phosphate
  modified_base 4: mod_base = OTHER; note = 2'-O-methylguanosine-3'-phosphate
  modified_base 5: mod_base = OTHER; note = 2'-O-methylguanosine-3'-phosphate
  modified_base 6: mod_base = OTHER; note = 2'-fluorouridine-3'-phosphate
  modified_base 7: mod_base = OTHER; note = 2'-O-methyluridine-3'-phosphate
  modified_base 8: mod_base = OTHER; note = 2'-fluorouridine-3'-phosphate
  modified_base 9: mod_base = OTHER; note = 2'-fluorouridine-3'-phosphate
  modified_base 10: mod_base = OTHER; note = 2'-O-methyladenosine-3'-phosphate
  modified_base 11: mod_base = OTHER; note = 2'-O-methyluridine-3'-phosphate
  modified_base 12: mod_base = OTHER; note = 2'-O-methyluridine-3'-phosphate
  modified_base 13: mod_base = OTHER; note = 2'-O-methyluridine-3'-phosphate
  modified_base 14: mod_base = OTHER; note = 2'-fluoroguanosine-3'-phosphate
  modified_base 15: mod_base = OTHER; note = 2'-O-methylguanosine-3'-phosphate
  modified_base 16: mod_base = OTHER; note = 2'-fluorocytidine-3'-phosphate
  modified_base 17: mod_base = OTHER; note = 2'-O-methyladenosine-3'-phosphate
  modified_base 18: mod_base = OTHER; note = 2'-O-methyluridine-3'-phosphate
  modified_base 19: mod_base = OTHER; note = 2'-O-methylguanosine-3'-phosphate
  modified_base 20: mod_base = OTHER; note = 2'-O-methyladenosine-3'-phosphate
  modified_base 21: mod_base = OTHER; note = 2'-O-methylcytidine-3'- phosphorothioate
  modified_base 22: mod_base = OTHER; note = 2'-O-methyladenosine-3'- phosphorothioate
  modified_base 23: mod_base = OTHER; note = 2'-O-methylcytidine-3'-phosphate
taaggttttatttggcatgacac

SEQ ID NO: 3151 - RNA, 23 nt, synthetic construct
  misc_feature 1..23: note = Description of Artificial Sequence: Synthetic oligonucleotide
  source 1..23: mol_type = other RNA
  modified_base 1: mod_base = OTHER; note = 2'-O-methyluridine-3'-phosphorothioate
  modified_base 2: mod_base = OTHER; note = 2'-fluoroadenosine-3'-phosphorothioate
  modified_base 3: mod_base = OTHER; note = 2'-O-methyladenosine-3'-phosphate
  modified_base 4: mod_base = OTHER; note = 2'-O-methylcytidine-3'-phosphate
  modified_base 5: mod_base = OTHER; note = 2'-O-methyladenosine-3'-phosphate
  modified_base 6: mod_base = OTHER; note = 2'-fluorouridine-3'-phosphate
  modified_base 7: mod_base = OTHER; note = 2'-O-methyluridine-3'-phosphate
  modified_base 8: mod_base = OTHER; note = 2'-fluorouridine-3'-phosphate
  modified_base 9: mod_base = OTHER; note = 2'-fluoroadenosine-3'-phosphate
  modified_base 10: mod_base = OTHER; note = 2'-O-methyluridine-3'-phosphate
  modified_base 11: mod_base = OTHER; note = 2'-O-methylguanosine-3'-phosphate
  modified_base 12: mod_base = OTHER; note = 2'-O-methylcytidine-3'-phosphate
  modified_base 13: mod_base = OTHER; note = 2'-O-methyladenosine-3'-phosphate
  modified_base 14: mod_base = OTHER; note = 2'-fluorocytidine-3'-phosphate
  modified_base 15: mod_base = OTHER; note = 2'-O-methyladenosine-3'-phosphate
  modified_base 16: mod_base = OTHER; note = 2'-fluoroadenosine-3'-phosphate
  modified_base 17: mod_base = OTHER; note = 2'-O-methylguanosine-3'-phosphate
  modified_base 18: mod_base = OTHER; note = 2'-O-methyladenosine-3'-phosphate
  modified_base 19: mod_base = OTHER; note = 2'-O-methyluridine-3'-phosphate
  modified_base 20: mod_base = OTHER; note = 2'-O-methyladenosine-3'-phosphate
  modified_base 21: mod_base = OTHER; note = 2'-O-methyluridine-3'-phosphorothioate
  modified_base 22: mod_base = OTHER; note = 2'-O-methylguanosine-3'- phosphorothioate
  modified_base 23: mod_base = OTHER; note = 2'-O-methylcytidine-3'-phosphate
taacatttatgcacaagatatgc

SEQ ID NO: 3152 - RNA, 23 nt, synthetic construct
  misc_feature 1..23: note = Description of Artificial Sequence: Synthetic oligonucleotide
  source 1..23: mol_type = other RNA
  modified_base 1: mod_base = OTHER; note = 2'-O-methyluridine-3'-phosphorothioate
  modified_base 2: mod_base = OTHER; note = 2'-fluoroguanosine-3'-phosphorothioate
  modified_base 3: mod_base = OTHER; note = 2'-O-methylguanosine-3'-phosphate
  modified_base 4: mod_base = OTHER; note = 2'-O-methyladenosine-3'-phosphate
  modified_base 5: mod_base = OTHER; note = 2'-O-methylguanosine-3'-phosphate
  modified_base 6: mod_base = OTHER; note = 2'-fluoroadenosine-3'-phosphate
  modified_base 7: mod_base = OTHER; note = 2'-O-methylcytidine-3'-phosphate
  modified_base 8: mod_base = OTHER; note = 2'-fluoroadenosine-3'-phosphate
  modified_base 9: mod_base = OTHER; note = 2'-fluoroadenosine-3'-phosphate
  modified_base 10: mod_base = OTHER; note = 2'-O-methyluridine-3'-phosphate
  modified_base 11: mod_base = OTHER; note = 2'-O-methyluridine-3'-phosphate
  modified_base 12: mod_base = OTHER; note = 2'-O-methyluridine-3'-phosphate
  modified_base 13: mod_base = OTHER; note = 2'-O-methyluridine-3'-phosphate
  modified_base 14: mod_base = OTHER; note = 2'-fluorouridine-3'-phosphate
  modified_base 15: mod_base = OTHER; note = 2'-O-methylguanosine-3'-phosphate
  modified_base 16: mod_base = OTHER; note = 2'-fluoroguanosine-3'-phosphate
  modified_base 17: mod_base = OTHER; note = 2'-O-methyluridine-3'-phosphate
  modified_base 18: mod_base = OTHER; note = 2'-O-methylguanosine-3'-phosphate
  modified_base 19: mod_base = OTHER; note = 2'-O-methyluridine-3'-phosphate
  modified_base 20: mod_base = OTHER; note = 2'-O-methyluridine-3'-phosphate
  modified_base 21: mod_base = OTHER; note = 2'-O-methyluridine-3'-phosphorothioate
  modified_base 22: mod_base = OTHER; note = 2'-O-methyluridine-3'-phosphorothioate
  modified_base 23: mod_base = OTHER; note = 2'-O-methyladenosine-3'-phosphate
tggagacaatttttggtgtttta

SEQ ID NO: 3153 - RNA, 23 nt, synthetic construct
  misc_feature 1..23: note = Description of Artificial Sequence: Synthetic oligonucleotide
  source 1..23: mol_type = other RNA
  modified_base 1: mod_base = OTHER; note = 2'-O-methyluridine-3'-phosphorothioate
  modified_base 2: mod_base = OTHER; note = 2'-fluorouridine -3'-phosphorothioate
  modified_base 3: mod_base = OTHER; note = 2'-O-methyladenosine-3'-phosphate
  modified_base 4: mod_base = OTHER; note = 2'-O-methylcytidine-3'-phosphate
  modified_base 5: mod_base = OTHER; note = 2'-O-methyladenosine-3'-phosphate
  modified_base 6: mod_base = OTHER; note = 2'-fluorocytidine-3'-phosphate
  modified_base 7: mod_base = OTHER; note = 2'-O-methyladenosine-3'-phosphate
  modified_base 8: mod_base = OTHER; note = 2'-fluorocytidine-3'-phosphate
  modified_base 9: mod_base = OTHER; note = 2'-fluorouridine-3'-phosphate
  modified_base 10: mod_base = OTHER; note = 2'-O-methylguanosine-3'-phosphate
  modified_base 11: mod_base = OTHER; note = 2'-O-methylguanosine-3'-phosphate
  modified_base 12: mod_base = OTHER; note = 2'-O-methyladenosine-3'-phosphate
  modified_base 13: mod_base = OTHER; note = 2'-O-methylguanosine-3'-phosphate
  modified_base 14: mod_base = OTHER; note = 2'-fluorocytidine-3'-phosphate
  modified_base 15: mod_base = OTHER; note = 2'-O-methylcytidine-3'-phosphate
  modified_base 16: mod_base = OTHER; note = 2'-fluoroadenosine-3'-phosphate
  modified_base 17: mod_base = OTHER; note = 2'-O-methylguanosine-3'-phosphate
  modified_base 18: mod_base = OTHER; note = 2'-O-methylguanosine-3'-phosphate
  modified_base 19: mod_base = OTHER; note = 2'-O-methyluridine-3'-phosphate
  modified_base 20: mod_base = OTHER; note = 2'-O-methyluridine-3'-phosphate
  modified_base 21: mod_base = OTHER; note = 2'-O-methyladenosine-3'- phosphorothioate
  modified_base 22: mod_base = OTHER; note = 2'-O-methyluridine-3'-phosphorothioate
  modified_base 23: mod_base = OTHER; note = 2'-O-methyladenosine-3'-phosphate
ttacacactggagccaggttata

SEQ ID NO: 3154 - RNA, 23 nt, synthetic construct
  misc_feature 1..23: note = Description of Artificial Sequence: Synthetic oligonucleotide
  source 1..23: mol_type = other RNA
  modified_base 1: mod_base = OTHER; note = 2'-O-methyluridine-3'-phosphorothioate
  modified_base 2: mod_base = OTHER; note = 2'-fluoroadenosine-3'-phosphorothioate
  modified_base 3: mod_base = OTHER; note = 2'-O-methyluridine-3'-phosphate
  modified_base 4: mod_base = OTHER; note = 2'-O-methyluridine-3'-phosphate
  modified_base 5: mod_base = OTHER; note = 2'-O-methyluridine-3'-phosphate
  modified_base 6: mod_base = OTHER; note = 2'-fluoroadenosine-3'-phosphate
  modified_base 7: mod_base = OTHER; note = 2'-O-methyluridine-3'-phosphate
  modified_base 8: mod_base = OTHER; note = 2'-fluoroguanosine-3'-phosphate
  modified_base 9: mod_base = OTHER; note = 2'-fluorocytidine-3'-phosphate
  modified_base 10: mod_base = OTHER; note = 2'-O-methyladenosine-3'-phosphate
  modified_base 11: mod_base = OTHER; note = 2'-O-methylcytidine-3'-phosphate
  modified_base 12: mod_base = OTHER; note = 2'-O-methyladenosine-3'-phosphate
  modified_base 13: mod_base = OTHER; note = 2'-O-methyladenosine-3'-phosphate
  modified_base 14: mod_base = OTHER; note = 2'-fluoroguanosine-3'-phosphate
  modified_base 15: mod_base = OTHER; note = 2'-O-methyladenosine-3'-phosphate
  modified_base 16: mod_base = OTHER; note = 2'-fluorouridine-3'-phosphate
  modified_base 17: mod_base = OTHER; note = 2'-O-methyladenosine-3'-phosphate
  modified_base 18: mod_base = OTHER; note = 2'-O-methyluridine-3'-phosphate
  modified_base 19: mod_base = OTHER; note = 2'-O-methylguanosine-3'-phosphate
  modified_base 20: mod_base = OTHER; note = 2'-O-methylcytidine-3'-phosphate
  modified_base 21: mod_base = OTHER; note = 2'-O-methyladenosine-3'- phosphorothioate
  modified_base 22: mod_base = OTHER; note = 2'-O-methyluridine-3'-phosphorothioate
  modified_base 23: mod_base = OTHER; note = 2'-O-methylcytidine-3'-phosphate
tatttatgcacaagatatgcatc

SEQ ID NO: 3155 - RNA, 23 nt, synthetic construct
  misc_feature 1..23: note = Description of Artificial Sequence: Synthetic oligonucleotide
  source 1..23: mol_type = other RNA
  modified_base 1: mod_base = OTHER; note = 2'-O-methyluridine-3'-phosphorothioate
  modified_base 2: mod_base = OTHER; note = 2'-fluorouridine -3'-phosphorothioate
  modified_base 3: mod_base = OTHER; note = 2'-O-methylguanosine-3'-phosphate
  modified_base 4: mod_base = OTHER; note = 2'-O-methylguanosine-3'-phosphate
  modified_base 5: mod_base = OTHER; note = 2'-O-methyladenosine-3'-phosphate
  modified_base 6: mod_base = OTHER; note = 2'-fluorocytidine-3'-phosphate
  modified_base 7: mod_base = OTHER; note = 2'-O-methyluridine-3'-phosphate
  modified_base 8: mod_base = OTHER; note = 2'-fluoroguanosine-3'-phosphate
  modified_base 9: mod_base = OTHER; note = 2'-fluorouridine-3'-phosphate
  modified_base 10: mod_base = OTHER; note = 2'-O-methyladenosine-3'-phosphate
  modified_base 11: mod_base = OTHER; note = 2'-O-methylcytidine-3'-phosphate
  modified_base 12: mod_base = OTHER; note = 2'-O-methyluridine-3'-phosphate
  modified_base 13: mod_base = OTHER; note = 2'-O-methyluridine-3'-phosphate
  modified_base 14: mod_base = OTHER; note = 2'-fluoroguanosine-3'-phosphate
  modified_base 15: mod_base = OTHER; note = 2'-O-methyladenosine-3'-phosphate
  modified_base 16: mod_base = OTHER; note = 2'-fluorocytidine-3'-phosphate
  modified_base 17: mod_base = OTHER; note = 2'-O-methyladenosine-3'-phosphate
  modified_base 18: mod_base = OTHER; note = 2'-O-methyladenosine-3'-phosphate
  modified_base 19: mod_base = OTHER; note = 2'-O-methyluridine-3'-phosphate
  modified_base 20: mod_base = OTHER; note = 2'-O-methylguanosine-3'-phosphate
  modified_base 21: mod_base = OTHER; note = 2'-O-methyluridine-3'-phosphorothioate
  modified_base 22: mod_base = OTHER; note = 2'-O-methyluridine-3'-phosphorothioate
  modified_base 23: mod_base = OTHER; note = 2'-O-methylguanosine-3'-phosphate
ttggactgtacttgacaatgttg

SEQ ID NO: 3156 - RNA, 23 nt, synthetic construct
  misc_feature 1..23: note = Description of Artificial Sequence: Synthetic oligonucleotide
  source 1..23: mol_type = other RNA
  modified_base 1: mod_base = OTHER; note = 2'-O-methyluridine-3'-phosphorothioate
  modified_base 2: mod_base = OTHER; note = 2'-fluorouridine -3'-phosphorothioate
  modified_base 3: mod_base = OTHER; note = 2'-O-methyluridine-3'-phosphate
  modified_base 4: mod_base = OTHER; note = 2'-O-methyluridine-3'-phosphate
  modified_base 5: mod_base = OTHER; note = 2'-O-methyluridine-3'-phosphate
  modified_base 6: mod_base = OTHER; note = 2'-fluorouridine-3'-phosphate
  modified_base 7: mod_base = OTHER; note = 2'-O-methyluridine-3'-phosphate
  modified_base 8: mod_base = OTHER; note = 2'-fluorocytidine-3'-phosphate
  modified_base 9: mod_base = OTHER; note = 2'-fluoroadenosine-3'-phosphate
  modified_base 10: mod_base = OTHER; note = 2'-O-methylcytidine-3'-phosphate
  modified_base 11: mod_base = OTHER; note = 2'-O-methyluridine-3'-phosphate
  modified_base 12: mod_base = OTHER; note = 2'-O-methylguanosine-3'-phosphate
  modified_base 13: mod_base = OTHER; note = 2'-O-methyluridine-3'-phosphate
  modified_base 14: mod_base = OTHER; note = 2'-fluorouridine-3'-phosphate
  modified_base 15: mod_base = OTHER; note = 2'-O-methylcytidine-3'-phosphate
  modified_base 16: mod_base = OTHER; note = 2'-fluoroadenosine-3'-phosphate
  modified_base 17: mod_base = OTHER; note = 2'-O-methyladenosine-3'-phosphate
  modified_base 18: mod_base = OTHER; note = 2'-O-methylguanosine-3'-phosphate
  modified_base 19: mod_base = OTHER; note = 2'-O-methylguanosine-3'-phosphate
  modified_base 20: mod_base = OTHER; note = 2'-O-methyluridine-3'-phosphate
  modified_base 21: mod_base = OTHER; note = 2'-O-methyluridine-3'-phosphorothioate
  modified_base 22: mod_base = OTHER; note = 2'-O-methyluridine-3'-phosphorothioate
  modified_base 23: mod_base = OTHER; note = 2'-O-methyluridine-3'-phosphate
tttttttcactgttcaaggtttt

SEQ ID NO: 3157 - RNA, 23 nt, synthetic construct
  misc_feature 1..23: note = Description of Artificial Sequence: Synthetic oligonucleotide
  source 1..23: mol_type = other RNA
  modified_base 1: mod_base = OTHER; note = 2'-O-methyladenosine-3'- phosphorothioate
  modified_base 2: mod_base = OTHER; note = 2'-fluorocytidine-3'-phosphorothioate
  modified_base 3: mod_base = OTHER; note = 2'-O-methyladenosine-3'-phosphate
  modified_base 4: mod_base = OTHER; note = 2'-O-methyluridine-3'-phosphate
  modified_base 5: mod_base = OTHER; note = 2'-O-methyladenosine-3'-phosphate
  modified_base 6: mod_base = OTHER; note = 2'-fluoroadenosine-3'-phosphate
  modified_base 7: mod_base = OTHER; note = 2'-O-methyluridine-3'-phosphate
  modified_base 8: mod_base = OTHER; note = 2'-fluoroadenosine-3'-phosphate
  modified_base 9: mod_base = OTHER; note = 2'-fluorouridine-3'-phosphate
  modified_base 10: mod_base = OTHER; note = 2'-O-methyluridine-3'-phosphate
  modified_base 11: mod_base = OTHER; note = 2'-O-methylguanosine-3'-phosphate
  modified_base 12: mod_base = OTHER; note = 2'-O-methylcytidine-3'-phosphate
  modified_base 13: mod_base = OTHER; note = 2'-O-methyladenosine-3'-phosphate
  modified_base 14: mod_base = OTHER; note = 2'-fluoroadenosine-3'-phosphate
  modified_base 15: mod_base = OTHER; note = 2'-O-methyluridine-3'-phosphate
  modified_base 16: mod_base = OTHER; note = 2'-fluoroguanosine-3'-phosphate
  modified_base 17: mod_base = OTHER; note = 2'-O-methylcytidine-3'-phosphate
  modified_base 18: mod_base = OTHER; note = 2'-O-methyladenosine-3'-phosphate
  modified_base 19: mod_base = OTHER; note = 2'-O-methylcytidine-3'-phosphate
  modified_base 20: mod_base = OTHER; note = 2'-O-methyladenosine-3'-phosphate
  modified_base 21: mod_base = OTHER; note = 2'-O-methylcytidine-3'- phosphorothioate
  modified_base 22: mod_base = OTHER; note = 2'-O-methyluridine-3'-phosphorothioate
  modified_base 23: mod_base = OTHER; note = 2'-O-methyladenosine-3'-phosphate
acataatattgcaatgcacacta

SEQ ID NO: 3158 - RNA, 23 nt, synthetic construct
  misc_feature 1..23: note = Description of Artificial Sequence: Synthetic oligonucleotide
  source 1..23: mol_type = other RNA
  modified_base 1: mod_base = OTHER; note = 2'-O-methyluridine-3'-phosphorothioate
  modified_base 2: mod_base = OTHER; note = 2'-fluorouridine -3'-phosphorothioate
  modified_base 3: mod_base = OTHER; note = 2'-O-methylcytidine-3'-phosphate
  modified_base 4: mod_base = OTHER; note = 2'-O-methylcytidine-3'-phosphate
  modified_base 5: mod_base = OTHER; note = 2'-O-methyladenosine-3'-phosphate
  modified_base 6: mod_base = OTHER; note = 2'-fluoroadenosine-3'-phosphate
  modified_base 7: mod_base = OTHER; note = 2'-O-methyluridine-3'-phosphate
  modified_base 8: mod_base = OTHER; note = 2'-fluorouridine-3'-phosphate
  modified_base 9: mod_base = OTHER; note = 2'-fluoroadenosine-3'-phosphate
  modified_base 10: mod_base = OTHER; note = 2'-O-methylcytidine-3'-phosphate
  modified_base 11: mod_base = OTHER; note = 2'-O-methyluridine-3'-phosphate
  modified_base 12: mod_base = OTHER; note = 2'-O-methylcytidine-3'-phosphate
  modified_base 13: mod_base = OTHER; note = 2'-O-methylguanosine-3'-phosphate
  modified_base 14: mod_base = OTHER; note = 2'-fluoroguanosine-3'-phosphate
  modified_base 15: mod_base = OTHER; note = 2'-O-methyluridine-3'-phosphate
  modified_base 16: mod_base = OTHER; note = 2'-fluorouridine-3'-phosphate
  modified_base 17: mod_base = OTHER; note = 2'-O-methyluridine-3'-phosphate
  modified_base 18: mod_base = OTHER; note = 2'-O-methyluridine-3'-phosphate
  modified_base 19: mod_base = OTHER; note = 2'-O-methyluridine-3'-phosphate
  modified_base 20: mod_base = OTHER; note = 2'-O-methylguanosine-3'-phosphate
  modified_base 21: mod_base = OTHER; note = 2'-O-methylguanosine-3'- phosphorothioate
  modified_base 22: mod_base = OTHER; note = 2'-O-methylguanosine-3'- phosphorothioate
  modified_base 23: mod_base = OTHER; note = 2'-O-methyladenosine-3'-phosphate
ttccaattactcggtttttggga

SEQ ID NO: 3159 - RNA, 23 nt, synthetic construct
  misc_feature 1..23: note = Description of Artificial Sequence: Synthetic oligonucleotide
  source 1..23: mol_type = other RNA
  modified_base 1: mod_base = OTHER; note = 2'-O-methyluridine-3'-phosphorothioate
  modified_base 2: mod_base = OTHER; note = 2'-fluorouridine -3'-phosphorothioate
  modified_base 3: mod_base = OTHER; note = 2'-O-methyluridine-3'-phosphate
  modified_base 4: mod_base = OTHER; note = 2'-O-methylcytidine-3'-phosphate
  modified_base 5: mod_base = OTHER; note = 2'-O-methylcytidine-3'-phosphate
  modified_base 6: mod_base = OTHER; note = 2'-fluoroadenosine-3'-phosphate
  modified_base 7: mod_base = OTHER; note = 2'-O-methyladenosine-3'-phosphate
  modified_base 8: mod_base = OTHER; note = 2'-fluorouridine-3'-phosphate
  modified_base 9: mod_base = OTHER; note = 2'-fluorouridine-3'-phosphate
  modified_base 10: mod_base = OTHER; note = 2'-O-methyladenosine-3'-phosphate
  modified_base 11: mod_base = OTHER; note = 2'-O-methylcytidine-3'-phosphate
  modified_base 12: mod_base = OTHER; note = 2'-O-methyluridine-3'-phosphate
  modified_base 13: mod_base = OTHER; note = 2'-O-methylcytidine-3'-phosphate
  modified_base 14: mod_base = OTHER; note = 2'-fluoroguanosine-3'-phosphate
  modified_base 15: mod_base = OTHER; note = 2'-O-methylguanosine-3'-phosphate
  modified_base 16: mod_base = OTHER; note = 2'-fluorouridine-3'-phosphate
  modified_base 17: mod_base = OTHER; note = 2'-O-methyluridine-3'-phosphate
  modified_base 18: mod_base = OTHER; note = 2'-O-methyluridine-3'-phosphate
  modified_base 19: mod_base = OTHER; note = 2'-O-methyluridine-3'-phosphate
  modified_base 20: mod_base = OTHER; note = 2'-O-methyluridine-3'-phosphate
  modified_base 21: mod_base = OTHER; note = 2'-O-methylguanosine-3'- phosphorothioate
  modified_base 22: mod_base = OTHER; note = 2'-O-methylguanosine-3'- phosphorothioate
  modified_base 23: mod_base = OTHER; note = 2'-O-methylguanosine-3'-phosphate
tttccaattactcggtttttggg

SEQ ID NO: 3160 - RNA, 23 nt, synthetic construct
  misc_feature 1..23: note = Description of Artificial Sequence: Synthetic oligonucleotide
  source 1..23: mol_type = other RNA
  modified_base 1: mod_base = OTHER; note = 2'-O-methyluridine-3'-phosphorothioate
  modified_base 2: mod_base = OTHER; note = 2'-fluoroadenosine-3'-phosphorothioate
  modified_base 3: mod_base = OTHER; note = 2'-O-methylcytidine-3'-phosphate
  modified_base 4: mod_base = OTHER; note = 2'-O-methyluridine-3'-phosphate
  modified_base 5: mod_base = OTHER; note = 2'-O-methyladenosine-3'-phosphate
  modified_base 6: mod_base = OTHER; note = 2'-fluorocytidine-3'-phosphate
  modified_base 7: mod_base = OTHER; note = 2'-O-methyladenosine-3'-phosphate
  modified_base 8: mod_base = OTHER; note = 2'-fluorocytidine-3'-phosphate
  modified_base 9: mod_base = OTHER; note = 2'-fluoroadenosine-3'-phosphate
  modified_base 10: mod_base = OTHER; note = 2'-O-methyladenosine-3'-phosphate
  modified_base 11: mod_base = OTHER; note = 2'-O-methylguanosine-3'-phosphate
  modified_base 12: mod_base = OTHER; note = 2'-O-methyluridine-3'-phosphate
  modified_base 13: mod_base = OTHER; note = 2'-O-methyladenosine-3'-phosphate
  modified_base 14: mod_base = OTHER; note = 2'-fluorocytidine-3'-phosphate
  modified_base 15: mod_base = OTHER; note = 2'-O-methylcytidine-3'-phosphate
  modified_base 16: mod_base = OTHER; note = 2'-fluoroadenosine-3'-phosphate
  modified_base 17: mod_base = OTHER; note = 2'-O-methylcytidine-3'-phosphate
  modified_base 18: mod_base = OTHER; note = 2'-O-methyluridine-3'-phosphate
  modified_base 19: mod_base = OTHER; note = 2'-O-methyluridine-3'-phosphate
  modified_base 20: mod_base = OTHER; note = 2'-O-methylguanosine-3'-phosphate
  modified_base 21: mod_base = OTHER; note = 2'-O-methylguanosine-3'- phosphorothioate
  modified_base 22: mod_base = OTHER; note = 2'-O-methylcytidine-3'- phosphorothioate
  modified_base 23: mod_base = OTHER; note = 2'-O-methyladenosine-3'-phosphate
tactacacaagtaccacttggca

SEQ ID NO: 3161 - RNA, 23 nt, synthetic construct
  misc_feature 1..23: note = Description of Artificial Sequence: Synthetic oligonucleotide
  source 1..23: mol_type = other RNA
  modified_base 1: mod_base = OTHER; note = 2'-O-methyluridine-3'-phosphorothioate
  modified_base 2: mod_base = OTHER; note = 2'-fluoroadenosine-3'-phosphorothioate
  modified_base 3: mod_base = OTHER; note = 2'-O-methyladenosine-3'-phosphate
  modified_base 4: mod_base = OTHER; note = 2'-O-methylguanosine-3'-phosphate
  modified_base 5: mod_base = OTHER; note = 2'-O-methyladenosine-3'-phosphate
  modified_base 6: mod_base = OTHER; note = 2'-fluorouridine-3'-phosphate
  modified_base 7: mod_base = OTHER; note = 2'-O-methylguanosine-3'-phosphate
  modified_base 8: mod_base = OTHER; note = 2'-fluorouridine-3'-phosphate
  modified_base 9: mod_base = OTHER; note = 2'-fluorouridine-3'-phosphate
  modified_base 10: mod_base = OTHER; note = 2'-O-methylcytidine-3'-phosphate
  modified_base 11: mod_base = OTHER; note = 2'-O-methyladenosine-3'-phosphate
  modified_base 12: mod_base = OTHER; note = 2'-O-methylcytidine-3'-phosphate
  modified_base 13: mod_base = OTHER; note = 2'-O-methylguanosine-3'-phosphate
  modified_base 14: mod_base = OTHER; note = 2'-fluorouridine-3'-phosphate
  modified_base 15: mod_base = OTHER; note = 2'-O-methyluridine-3'-phosphate
  modified_base 16: mod_base = OTHER; note = 2'-fluorouridine-3'-phosphate
  modified_base 17: mod_base = OTHER; note = 2'-O-methylcytidine-3'-phosphate
  modified_base 18: mod_base = OTHER; note = 2'-O-methylguanosine-3'-phosphate
  modified_base 19: mod_base = OTHER; note = 2'-O-methylcytidine-3'-phosphate
  modified_base 20: mod_base = OTHER; note = 2'-O-methyluridine-3'-phosphate
  modified_base 21: mod_base = OTHER; note = 2'-O-methylguanosine-3'- phosphorothioate
  modified_base 22: mod_base = OTHER; note = 2'-O-methylguanosine-3'- phosphorothioate
  modified_base 23: mod_base = OTHER; note = 2'-O-methyladenosine-3'-phosphate
taagatgttcacgtttcgctgga

SEQ ID NO: 3162 - RNA, 23 nt, synthetic construct
  misc_feature 1..23: note = Description of Artificial Sequence: Synthetic oligonucleotide
  source 1..23: mol_type = other RNA
  modified_base 1: mod_base = OTHER; note = 2'-O-methyluridine-3'-phosphorothioate
  modified_base 2: mod_base = OTHER; note = 2'-fluorocytidine-3'-phosphorothioate
  modified_base 3: mod_base = OTHER; note = 2'-O-methyluridine-3'-phosphate
  modified_base 4: mod_base = OTHER; note = 2'-O-methyluridine-3'-phosphate
  modified_base 5: mod_base = OTHER; note = 2'-O-methyladenosine-3'-phosphate
  modified_base 6: mod_base = OTHER; note = 2'-fluoroadenosine-3'-phosphate
  modified_base 7: mod_base = OTHER; note = 2'-O-methylguanosine-3'-phosphate
  modified_base 8: mod_base = OTHER; note = 2'-fluoroadenosine-3'-phosphate
  modified_base 9: mod_base = OTHER; note = 2'-fluoroadenosine-3'-phosphate
  modified_base 10: mod_base = OTHER; note = 2'-O-methylguanosine-3'-phosphate
  modified_base 11: mod_base = OTHER; note = 2'-O-methyladenosine-3'-phosphate
  modified_base 12: mod_base = OTHER; note = 2'-O-methyluridine-3'-phosphate
  modified_base 13: mod_base = OTHER; note = 2'-O-methyluridine-3'-phosphate
  modified_base 14: mod_base = OTHER; note = 2'-fluorocytidine-3'-phosphate
  modified_base 15: mod_base = OTHER; note = 2'-O-methyladenosine-3'-phosphate
  modified_base 16: mod_base = OTHER; note = 2'-fluorocytidine-3'-phosphate
  modified_base 17: mod_base = OTHER; note = 2'-O-methyladenosine-3'-phosphate
  modified_base 18: mod_base = OTHER; note = 2'-O-methyladenosine-3'-phosphate
  modified_base 19: mod_base = OTHER; note = 2'-O-methyluridine-3'-phosphate
  modified_base 20: mod_base = OTHER; note = 2'-O-methylcytidine-3'-phosphate
  modified_base 21: mod_base = OTHER; note = 2'-O-methyladenosine-3'- phosphorothioate
  modified_base 22: mod_base = OTHER; note = 2'-O-methylguanosine-3'- phosphorothioate
  modified_base 23: mod_base = OTHER; note = 2'-O-methylcytidine-3'-phosphate
tcttaagaagattcacaatcagc

SEQ ID NO: 3163 - RNA, 23 nt, synthetic construct
  misc_feature 1..23: note = Description of Artificial Sequence: Synthetic oligonucleotide
  source 1..23: mol_type = other RNA
  modified_base 1: mod_base = OTHER; note = 2'-O-methyluridine-3'-phosphorothioate
  modified_base 2: mod_base = OTHER; note = 2'-fluorouridine -3'-phosphorothioate
  modified_base 3: mod_base = OTHER; note = 2'-O-methylguanosine-3'-phosphate
  modified_base 4: mod_base = OTHER; note = 2'-O-methylguanosine-3'-phosphate
  modified_base 5: mod_base = OTHER; note = 2'-O-methylguanosine-3'-phosphate
  modified_base 6: mod_base = OTHER; note = 2'-fluoroadenosine-3'-phosphate
  modified_base 7: mod_base = OTHER; note = 2'-O-methyladenosine-3'-phosphate
  modified_base 8: mod_base = OTHER; note = 2'-fluorouridine-3'-phosphate
  modified_base 9: mod_base = OTHER; note = 2'-fluoroguanosine-3'-phosphate
  modified_base 10: mod_base = OTHER; note = 2'-O-methyladenosine-3'-phosphate
  modified_base 11: mod_base = OTHER; note = 2'-O-methyluridine-3'-phosphate
  modified_base 12: mod_base = OTHER; note = 2'-O-methylguanosine-3'-phosphate
  modified_base 13: mod_base = OTHER; note = 2'-O-methyladenosine-3'-phosphate
  modified_base 14: mod_base = OTHER; note = 2'-fluoroadenosine-3'-phosphate
  modified_base 15: mod_base = OTHER; note = 2'-O-methylcytidine-3'-phosphate
  modified_base 16: mod_base = OTHER; note = 2'-fluorouridine-3'-phosphate
  modified_base 17: mod_base = OTHER; note = 2'-O-methyluridine-3'-phosphate
  modified_base 18: mod_base = OTHER; note = 2'-O-methylguanosine-3'-phosphate
  modified_base 19: mod_base = OTHER; note = 2'-O-methyladenosine-3'-phosphate
  modified_base 20: mod_base = OTHER; note = 2'-O-methyladenosine-3'-phosphate
  modified_base 21: mod_base = OTHER; note = 2'-O-methylguanosine-3'- phosphorothioate
  modified_base 22: mod_base = OTHER; note = 2'-O-methyladenosine-3'- phosphorothioate
  modified_base 23: mod_base = OTHER; note = 2'-O-methyluridine-3'-phosphate
ttgggaatgatgaacttgaagat

SEQ ID NO: 3164 - RNA, 23 nt, synthetic construct
  misc_feature 1..23: note = Description of Artificial Sequence: Synthetic oligonucleotide
  source 1..23: mol_type = other RNA
  modified_base 1: mod_base = OTHER; note = 2'-O-methyladenosine-3'- phosphorothioate
  modified_base 2: mod_base = OTHER; note = 2'-fluoroguanosine-3'-phosphorothioate
  modified_base 3: mod_base = OTHER; note = 2'-O-methyladenosine-3'-phosphate
  modified_base 4: mod_base = OTHER; note = 2'-O-methyluridine-3'-phosphate
  modified_base 5: mod_base = OTHER; note = 2'-O-methyluridine-3'-phosphate
  modified_base 6: mod_base = OTHER; note = 2'-fluorocytidine-3'-phosphate
  modified_base 7: mod_base = OTHER; note = 2'-O-methyladenosine-3'-phosphate
  modified_base 8: mod_base = OTHER; note = 2'-fluorocytidine-3'-phosphate
  modified_base 9: mod_base = OTHER; note = 2'-fluoroadenosine-3'-phosphate
  modified_base 10: mod_base = OTHER; note = 2'-O-methyladenosine-3'-phosphate
  modified_base 11: mod_base = OTHER; note = 2'-O-methyluridine-3'-phosphate
  modified_base 12: mod_base = OTHER; note = 2'-O-methylcytidine-3'-phosphate
  modified_base 13: mod_base = OTHER; note = 2'-O-methyladenosine-3'-phosphate
  modified_base 14: mod_base = OTHER; note = 2'-fluoroguanosine-3'-phosphate
  modified_base 15: mod_base = OTHER; note = 2'-O-methylcytidine-3'-phosphate
  modified_base 16: mod_base = OTHER; note = 2'-fluorouridine-3'-phosphate
  modified_base 17: mod_base = OTHER; note = 2'-O-methylguanosine-3'-phosphate
  modified_base 18: mod_base = OTHER; note = 2'-O-methylguanosine-3'-phosphate
  modified_base 19: mod_base = OTHER; note = 2'-O-methyluridine-3'-phosphate
  modified_base 20: mod_base = OTHER; note = 2'-O-methylcytidine-3'-phosphate
  modified_base 21: mod_base = OTHER; note = 2'-O-methylcytidine-3'- phosphorothioate
  modified_base 22: mod_base = OTHER; note = 2'-O-methyluridine-3'-phosphorothioate
  modified_base 23: mod_base = OTHER; note = 2'-O-methyluridine-3'-phosphate
agattcacaatcagctggtcctt

SEQ ID NO: 3165 - RNA, 23 nt, synthetic construct
  misc_feature 1..23: note = Description of Artificial Sequence: Synthetic oligonucleotide
  source 1..23: mol_type = other RNA
  modified_base 1: mod_base = OTHER; note = 2'-O-methyluridine-3'-phosphorothioate
  modified_base 2: mod_base = OTHER; note = 2'-fluorouridine -3'-phosphorothioate
  modified_base 3: mod_base = OTHER; note = 2'-O-methyluridine-3'-phosphate
  modified_base 4: mod_base = OTHER; note = 2'-O-methylcytidine-3'-phosphate
  modified_base 5: mod_base = OTHER; note = 2'-O-methyladenosine-3'-phosphate
  modified_base 6: mod_base = OTHER; note = 2'-fluoroadenosine-3'-phosphate
  modified_base 7: mod_base = OTHER; note = 2'-O-methylguanosine-3'-phosphate
  modified_base 8: mod_base = OTHER; note = 2'-fluoroguanosine-3'-phosphate
  modified_base 9: mod_base = OTHER; note = 2'-fluorouridine-3'-phosphate
  modified_base 10: mod_base = OTHER; note = 2'-O-methyluridine-3'-phosphate
  modified_base 11: mod_base = OTHER; note = 2'-O-methyluridine-3'-phosphate
  modified_base 12: mod_base = OTHER; note = 2'-O-methyluridine-3'-phosphate
  modified_base 13: mod_base = OTHER; note = 2'-O-methyladenosine-3'-phosphate
  modified_base 14: mod_base = OTHER; note = 2'-fluorouridine-3'-phosphate
  modified_base 15: mod_base = OTHER; note = 2'-O-methyluridine-3'-phosphate
  modified_base 16: mod_base = OTHER; note = 2'-fluorouridine-3'-phosphate
  modified_base 17: mod_base = OTHER; note = 2'-O-methylguanosine-3'-phosphate
  modified_base 18: mod_base = OTHER; note = 2'-O-methylguanosine-3'-phosphate
  modified_base 19: mod_base = OTHER; note = 2'-O-methylcytidine-3'-phosphate
  modified_base 20: mod_base = OTHER; note = 2'-O-methyladenosine-3'-phosphate
  modified_base 21: mod_base = OTHER; note = 2'-O-methyluridine-3'-phosphorothioate
  modified_base 22: mod_base = OTHER; note = 2'-O-methylguanosine-3'- phosphorothioate
  modified_base 23: mod_base = OTHER; note = 2'-O-methyladenosine-3'-phosphate
tttcaaggttttatttggcatga

SEQ ID NO: 3166 - RNA, 23 nt, synthetic construct
  misc_feature 1..23: note = Description of Artificial Sequence: Synthetic oligonucleotide
  source 1..23: mol_type = other RNA
aaaacaccaaaaattgtctccag

SEQ ID NO: 3167 - RNA, 23 nt, synthetic construct
  misc_feature 1..23: note = Description of Artificial Sequence: Synthetic oligonucleotide
  source 1..23: mol_type = other RNA
aaaaaccgagtaattggaagtgg

SEQ ID NO: 3168 - RNA, 23 nt, synthetic construct
  misc_feature 1..23: note = Description of Artificial Sequence: Synthetic oligonucleotide
  source 1..23: mol_type = other RNA
gaaaatcagtggctttcccaaaa

SEQ ID NO: 3169 - RNA, 23 nt, synthetic construct
  misc_feature 1..23: note = Description of Artificial Sequence: Synthetic oligonucleotide
  source 1..23: mol_type = other RNA
attcccaacattgtcaagtacag

SEQ ID NO: 3170 - RNA, 23 nt, synthetic construct
  misc_feature 1..23: note = Description of Artificial Sequence: Synthetic oligonucleotide
  source 1..23: mol_type = other RNA
cttgtgccatcagtatcttaatg

SEQ ID NO: 3171 - RNA, 23 nt, synthetic construct
  misc_feature 1..23: note = Description of Artificial Sequence: Synthetic oligonucleotide
  source 1..23: mol_type = other RNA
aaaaattgtctccagcaaagact

SEQ ID NO: 3172 - RNA, 23 nt, synthetic construct
  misc_feature 1..23: note = Description of Artificial Sequence: Synthetic oligonucleotide
  source 1..23: mol_type = other RNA
aaaccttgaacagtgaaaaaaaa

SEQ ID NO: 3173 - RNA, 23 nt, synthetic construct
  misc_feature 1..23: note = Description of Artificial Sequence: Synthetic oligonucleotide
  source 1..23: mol_type = other RNA
ttaaaacaccaaaaattgtctcc

SEQ ID NO: 3174 - RNA, 23 nt, synthetic construct
  misc_feature 1..23: note = Description of Artificial Sequence: Synthetic oligonucleotide
  source 1..23: mol_type = other RNA
acaccaaaaattgtctccagcaa

SEQ ID NO: 3175 - RNA, 23 nt, synthetic construct
  misc_feature 1..23: note = Description of Artificial Sequence: Synthetic oligonucleotide
  source 1..23: mol_type = other RNA
ttcaagttcatcattcccaacat

SEQ ID NO: 3176 - RNA, 23 nt, synthetic construct
  misc_feature 1..23: note = Description of Artificial Sequence: Synthetic oligonucleotide
  source 1..23: mol_type = other RNA
ttgcaatattatgtgagatgtaa

SEQ ID NO: 3177 - RNA, 23 nt, synthetic construct
  misc_feature 1..23: note = Description of Artificial Sequence: Synthetic oligonucleotide
  source 1..23: mol_type = other RNA
cggtctcaaaagattcaaagtcc

SEQ ID NO: 3178 - RNA, 23 nt, synthetic construct
  misc_feature 1..23: note = Description of Artificial Sequence: Synthetic oligonucleotide
  source 1..23: mol_type = other RNA
atcattcccaacattgtcaagta

SEQ ID NO: 3179 - RNA, 23 nt, synthetic construct
  misc_feature 1..23: note = Description of Artificial Sequence: Synthetic oligonucleotide
  source 1..23: mol_type = other RNA
taaaaccttgaacagtgaaaaaa

SEQ ID NO: 3180 - RNA, 23 nt, synthetic construct
  misc_feature 1..23: note = Description of Artificial Sequence: Synthetic oligonucleotide
  source 1..23: mol_type = other RNA
tctcaaaagattcaaagtccaag

SEQ ID NO: 3181 - RNA, 23 nt, synthetic construct
  misc_feature 1..23: note = Description of Artificial Sequence: Synthetic oligonucleotide
  source 1..23: mol_type = other RNA
gaacatcttcaagttcatcattc

SEQ ID NO: 3182 - RNA, 23 nt, synthetic construct
  misc_feature 1..23: note = Description of Artificial Sequence: Synthetic oligonucleotide
  source 1..23: mol_type = other RNA
accagctgattgtgaatcttctt

SEQ ID NO: 3183 - RNA, 23 nt, synthetic construct
  misc_feature 1..23: note = Description of Artificial Sequence: Synthetic oligonucleotide
  source 1..23: mol_type = other RNA
gtctcaaaagattcaaagtccaa

SEQ ID NO: 3184 - RNA, 23 nt, synthetic construct
  misc_feature 1..23: note = Description of Artificial Sequence: Synthetic oligonucleotide
  source 1..23: mol_type = other RNA
caaaaaccgagtaattggaagtg

SEQ ID NO: 3185 - RNA, 23 nt, synthetic construct
  misc_feature 1..23: note = Description of Artificial Sequence: Synthetic oligonucleotide
  source 1..23: mol_type = other RNA
catgatgcatatcttgtgcataa

SEQ ID NO: 3186 - RNA, 23 nt, synthetic construct
  misc_feature 1..23: note = Description of Artificial Sequence: Synthetic oligonucleotide
  source 1..23: mol_type = other RNA
tgccatcagtatcttaatgaagg

SEQ ID NO: 3187 - RNA, 23 nt, synthetic construct
  misc_feature 1..23: note = Description of Artificial Sequence: Synthetic oligonucleotide
  source 1..23: mol_type = other RNA
aaaatcagtggctttcccaaaaa

SEQ ID NO: 3188 - RNA, 23 nt, synthetic construct
  misc_feature 1..23: note = Description of Artificial Sequence: Synthetic oligonucleotide
  source 1..23: mol_type = other RNA
ccttaaaacaccaaaaattgtct

SEQ ID NO: 3189 - RNA, 23 nt, synthetic construct
  misc_feature 1..23: note = Description of Artificial Sequence: Synthetic oligonucleotide
  source 1..23: mol_type = other RNA
agctgattgtgaatcttcttaag

SEQ ID NO: 3190 - RNA, 23 nt, synthetic construct
  misc_feature 1..23: note = Description of Artificial Sequence: Synthetic oligonucleotide
  source 1..23: mol_type = other RNA
aaataaaaccttgaacagtgaaa

SEQ ID NO: 3191 - RNA, 23 nt, synthetic construct
  misc_feature 1..23: note = Description of Artificial Sequence: Synthetic oligonucleotide
  source 1..23: mol_type = other RNA
caagtgtcatgccaaataaaacc

SEQ ID NO: 3192 - RNA, 23 nt, synthetic construct
  misc_feature 1..23: note = Description of Artificial Sequence: Synthetic oligonucleotide
  source 1..23: mol_type = other RNA
aaacaccaaaaattgtctccagc

SEQ ID NO: 3193 - RNA, 23 nt, synthetic construct
  misc_feature 1..23: note = Description of Artificial Sequence: Synthetic oligonucleotide
  source 1..23: mol_type = other RNA
gtgcattgcaatattatgtgaga

SEQ ID NO: 3194 - RNA, 23 nt, synthetic construct
  misc_feature 1..23: note = Description of Artificial Sequence: Synthetic oligonucleotide
  source 1..23: mol_type = other RNA
gtgtcatgccaaataaaaccttg

SEQ ID NO: 3195 - RNA, 23 nt, synthetic construct
  misc_feature 1..23: note = Description of Artificial Sequence: Synthetic oligonucleotide
  source 1..23: mol_type = other RNA
gcatatcttgtgcataaatgttg

SEQ ID NO: 3196 - RNA, 23 nt, synthetic construct
  misc_feature 1..23: note = Description of Artificial Sequence: Synthetic oligonucleotide
  source 1..23: mol_type = other RNA
taaaacaccaaaaattgtctcca

SEQ ID NO: 3197 - RNA, 23 nt, synthetic construct
  misc_feature 1..23: note = Description of Artificial Sequence: Synthetic oligonucleotide
  source 1..23: mol_type = other RNA
tataacctggctccagtgtgtac

SEQ ID NO: 3198 - RNA, 23 nt, synthetic construct
  misc_feature 1..23: note = Description of Artificial Sequence: Synthetic oligonucleotide
  source 1..23: mol_type = other RNA
gatgcatatcttgtgcataaatg

SEQ ID NO: 3199 - RNA, 23 nt, synthetic construct
  misc_feature 1..23: note = Description of Artificial Sequence: Synthetic oligonucleotide
  source 1..23: mol_type = other RNA
caacattgtcaagtacagtccac

SEQ ID NO: 3200 - RNA, 23 nt, synthetic construct
  misc_feature 1..23: note = Description of Artificial Sequence: Synthetic oligonucleotide
  source 1..23: mol_type = other RNA
aaaaccttgaacagtgaaaaaaa

SEQ ID NO: 3201 - RNA, 23 nt, synthetic construct
  misc_feature 1..23: note = Description of Artificial Sequence: Synthetic oligonucleotide
  source 1..23: mol_type = other RNA
tagtgtgcattgcaatattatgt

SEQ ID NO: 3202 - RNA, 23 nt, synthetic construct
  misc_feature 1..23: note = Description of Artificial Sequence: Synthetic oligonucleotide
  source 1..23: mol_type = other RNA
tcccaaaaaccgagtaattggaa

SEQ ID NO: 3203 - RNA, 23 nt, synthetic construct
  misc_feature 1..23: note = Description of Artificial Sequence: Synthetic oligonucleotide
  source 1..23: mol_type = other RNA
cccaaaaaccgagtaattggaag

SEQ ID NO: 3204 - RNA, 23 nt, synthetic construct
  misc_feature 1..23: note = Description of Artificial Sequence: Synthetic oligonucleotide
  source 1..23: mol_type = other RNA
tgccaagtggtacttgtgtagtg

SEQ ID NO: 3205 - RNA, 23 nt, synthetic construct
  misc_feature 1..23: note = Description of Artificial Sequence: Synthetic oligonucleotide
  source 1..23: mol_type = other RNA
tccagcgaaacgtgaacatcttc

SEQ ID NO: 3206 - RNA, 23 nt, synthetic construct
  misc_feature 1..23: note = Description of Artificial Sequence: Synthetic oligonucleotide
  source 1..23: mol_type = other RNA
gctgattgtgaatcttcttaagg

SEQ ID NO: 3207 - RNA, 23 nt, synthetic construct
  misc_feature 1..23: note = Description of Artificial Sequence: Synthetic oligonucleotide
  source 1..23: mol_type = other RNA
atcttcaagttcatcattcccaa

SEQ ID NO: 3208 - RNA, 23 nt, synthetic construct
  misc_feature 1..23: note = Description of Artificial Sequence: Synthetic oligonucleotide
  source 1..23: mol_type = other RNA
aaggaccagctgattgtgaatct

SEQ ID NO: 3209 - RNA, 23 nt, synthetic construct
  misc_feature 1..23: note = Description of Artificial Sequence: Synthetic oligonucleotide
  source 1..23: mol_type = other RNA
tcatgccaaataaaaccttgaac

SEQ ID NO: 3210 - RNA, 21 nt, synthetic construct
  misc_feature 1..21: note = Description of Artificial Sequence: Synthetic oligonucleotide
  source 1..21: mol_type = other RNA
tttatctgatctgtgattaaa

SEQ ID NO: 3211 - RNA, 21 nt, synthetic construct
  misc_feature 1..21: note = Description of Artificial Sequence: Synthetic oligonucleotide
  source 1..21: mol_type = other RNA
actggttagtgtgaaatagtt

SEQ ID NO: 3212 - RNA, 21 nt, synthetic construct
  misc_feature 1..21: note = Description of Artificial Sequence: Synthetic oligonucleotide
  source 1..21: mol_type = other RNA
aacatgcctagtccaacattt

SEQ ID NO: 3213 - RNA, 21 nt, synthetic construct
  misc_feature 1..21: note = Description of Artificial Sequence: Synthetic oligonucleotide
  source 1..21: mol_type = other RNA
caagtccaatatggcaactct

SEQ ID NO: 3214 - RNA, 21 nt, synthetic construct
  misc_feature 1..21: note = Description of Artificial Sequence: Synthetic oligonucleotide
  source 1..21: mol_type = other RNA
tccaccatgattaagggtctt

SEQ ID NO: 3215 - RNA, 21 nt, synthetic construct
  misc_feature 1..21: note = Description of Artificial Sequence: Synthetic oligonucleotide
  source 1..21: mol_type = other RNA
tcatttcactgtctaggctaa

SEQ ID NO: 3216 - RNA, 21 nt, synthetic construct
  misc_feature 1..21: note = Description of Artificial Sequence: Synthetic oligonucleotide
  source 1..21: mol_type = other RNA
tgtcctttttatctgatctgt

SEQ ID NO: 3217 - RNA, 21 nt, synthetic construct
  misc_feature 1..21: note = Description of Artificial Sequence: Synthetic oligonucleotide
  source 1..21: mol_type = other RNA
ccagtgtataaatccaatata

SEQ ID NO: 3218 - RNA, 21 nt, synthetic construct
  misc_feature 1..21: note = Description of Artificial Sequence: Synthetic oligonucleotide
  source 1..21: mol_type = other RNA
tccaagtgttataccaactaa

SEQ ID NO: 3219 - RNA, 21 nt, synthetic construct
  misc_feature 1..21: note = Description of Artificial Sequence: Synthetic oligonucleotide
  source 1..21: mol_type = other RNA
gtcatcgaagacaaattgaaa

SEQ ID NO: 3220 - RNA, 21 nt, synthetic construct
  misc_feature 1..21: note = Description of Artificial Sequence: Synthetic oligonucleotide
  source 1..21: mol_type = other RNA
gaacaccaaagattgtctcta

SEQ ID NO: 3221 - RNA, 21 nt, synthetic construct
  misc_feature 1..21: note = Description of Artificial Sequence: Synthetic oligonucleotide
  source 1..21: mol_type = other RNA
aacaccaaagattgtctctga

SEQ ID NO: 3222 - RNA, 21 nt, synthetic construct
  misc_feature 1..21: note = Description of Artificial Sequence: Synthetic oligonucleotide
  source 1..21: mol_type = other RNA
atgttgtcctttttatctgat

SEQ ID NO: 3223 - RNA, 21 nt, synthetic construct
  misc_feature 1..21: note = Description of Artificial Sequence: Synthetic oligonucleotide
  source 1..21: mol_type = other RNA
tcaactcctgaagttagaaat

SEQ ID NO: 3224 - RNA, 21 nt, synthetic construct
  misc_feature 1..21: note = Description of Artificial Sequence: Synthetic oligonucleotide
  source 1..21: mol_type = other RNA
aactatccaagtgttatacca

SEQ ID NO: 3225 - RNA, 21 nt, synthetic construct
  misc_feature 1..21: note = Description of Artificial Sequence: Synthetic oligonucleotide
  source 1..21: mol_type = other RNA
tccttagaacaccaaagatta

SEQ ID NO: 3226 - RNA, 21 nt, synthetic construct
  misc_feature 1..21: note = Description of Artificial Sequence: Synthetic oligonucleotide
  source 1..21: mol_type = other RNA
ggtattaatcttgtgtagtct

SEQ ID NO: 3227 - RNA, 21 nt, synthetic construct
  misc_feature 1..21: note = Description of Artificial Sequence: Synthetic oligonucleotide
  source 1..21: mol_type = other RNA
ggctccttcactgaacatgca

SEQ ID NO: 3228 - RNA, 21 nt, synthetic construct
  misc_feature 1..21: note = Description of Artificial Sequence: Synthetic oligonucleotide
  source 1..21: mol_type = other RNA
tatcagtagtgtacattacca

SEQ ID NO: 3229 - RNA, 21 nt, synthetic construct
  misc_feature 1..21: note = Description of Artificial Sequence: Synthetic oligonucleotide
  source 1..21: mol_type = other RNA
cagccttttccttagaacaca

SEQ ID NO: 3230 - RNA, 21 nt, synthetic construct
  misc_feature 1..21: note = Description of Artificial Sequence: Synthetic oligonucleotide
  source 1..21: mol_type = other RNA
ctggttagtgtgaaatagtta

SEQ ID NO: 3231 - RNA, 21 nt, synthetic construct
  misc_feature 1..21: note = Description of Artificial Sequence: Synthetic oligonucleotide
  source 1..21: mol_type = other RNA
actatatcagtagtgtacatt

SEQ ID NO: 3232 - RNA, 21 nt, synthetic construct
  misc_feature 1..21: note = Description of Artificial Sequence: Synthetic oligonucleotide
  source 1..21: mol_type = other RNA
tatatcagtagtgtacattaa

SEQ ID NO: 3233 - RNA, 21 nt, synthetic construct
  misc_feature 1..21: note = Description of Artificial Sequence: Synthetic oligonucleotide
  source 1..21: mol_type = other RNA
gtaatattttaagatggacta

SEQ ID NO: 3234 - RNA, 21 nt, synthetic construct
  misc_feature 1..21: note = Description of Artificial Sequence: Synthetic oligonucleotide
  source 1..21: mol_type = other RNA
ttttaagatggactgggaaaa

SEQ ID NO: 3235 - RNA, 21 nt, synthetic construct
  misc_feature 1..21: note = Description of Artificial Sequence: Synthetic oligonucleotide
  source 1..21: mol_type = other RNA
tggttagtgtgaaatagttct

SEQ ID NO: 3236 - RNA, 21 nt, synthetic construct
  misc_feature 1..21: note = Description of Artificial Sequence: Synthetic oligonucleotide
  source 1..21: mol_type = other RNA
ttcactgaacatgcctagtca

SEQ ID NO: 3237 - RNA, 21 nt, synthetic construct
  misc_feature 1..21: note = Description of Artificial Sequence: Synthetic oligonucleotide
  source 1..21: mol_type = other RNA
accaactatccaagtgttata

SEQ ID NO: 3238 - RNA, 21 nt, synthetic construct
  misc_feature 1..21: note = Description of Artificial Sequence: Synthetic oligonucleotide
  source 1..21: mol_type = other RNA
ccaagtgttataccaactaaa

SEQ ID NO: 3239 - RNA, 21 nt, synthetic construct
  misc_feature 1..21: note = Description of Artificial Sequence: Synthetic oligonucleotide
  source 1..21: mol_type = other RNA
ttccttttggttccaagtcca

SEQ ID NO: 3240 - RNA, 21 nt, synthetic construct
  misc_feature 1..21: note = Description of Artificial Sequence: Synthetic oligonucleotide
  source 1..21: mol_type = other RNA
gcagccttttccttagaacaa

SEQ ID NO: 3241 - RNA, 21 nt, synthetic construct
  misc_feature 1..21: note = Description of Artificial Sequence: Synthetic oligonucleotide
  source 1..21: mol_type = other RNA
agtaatattttaagatggact

SEQ ID NO: 3242 - RNA, 21 nt, synthetic construct
  misc_feature 1..21: note = Description of Artificial Sequence: Synthetic oligonucleotide
  source 1..21: mol_type = other RNA
aaaatccacagctatatccta

SEQ ID NO: 3243 - RNA, 21 nt, synthetic construct
  misc_feature 1..21: note = Description of Artificial Sequence: Synthetic oligonucleotide
  source 1..21: mol_type = other RNA
tccttcactgaacatgcctaa

SEQ ID NO: 3244 - RNA, 21 nt, synthetic construct
  misc_feature 1..21: note = Description of Artificial Sequence: Synthetic oligonucleotide
  source 1..21: mol_type = other RNA
cactgaacatgcctagtccaa

SEQ ID NO: 3245 - RNA, 21 nt, synthetic construct
  misc_feature 1..21: note = Description of Artificial Sequence: Synthetic oligonucleotide
  source 1..21: mol_type = other RNA
aagtgttataccaactaaaac

SEQ ID NO: 3246 - RNA, 21 nt, synthetic construct
  misc_feature 1..21: note = Description of Artificial Sequence: Synthetic oligonucleotide
  source 1..21: mol_type = other RNA
ttccaccatgattaagggtct

SEQ ID NO: 3247 - RNA, 21 nt, synthetic construct
  misc_feature 1..21: note = Description of Artificial Sequence: Synthetic oligonucleotide
  source 1..21: mol_type = other RNA
gaacatgcctagtccaacatt

SEQ ID NO: 3248 - RNA, 21 nt, synthetic construct
  misc_feature 1..21: note = Description of Artificial Sequence: Synthetic oligonucleotide
  source 1..21: mol_type = other RNA
atcagtagtgtacattaccat

SEQ ID NO: 3249 - RNA, 21 nt, synthetic construct
  misc_feature 1..21: note = Description of Artificial Sequence: Synthetic oligonucleotide
  source 1..21: mol_type = other RNA
atccaagtgttataccaacta

SEQ ID NO: 3250 - RNA, 21 nt, synthetic construct
  misc_feature 1..21: note = Description of Artificial Sequence: Synthetic oligonucleotide
  source 1..21: mol_type = other RNA
ccaagtccaatatggcaacta

SEQ ID NO: 3251 - RNA, 21 nt, synthetic construct
  misc_feature 1..21: note = Description of Artificial Sequence: Synthetic oligonucleotide
  source 1..21: mol_type = other RNA
atctcagaccttgtgaaggta

SEQ ID NO: 3252 - RNA, 21 nt, synthetic construct
  misc_feature 1..21: note = Description of Artificial Sequence: Synthetic oligonucleotide
  source 1..21: mol_type = other RNA
catttcactgtctaggctaca

SEQ ID NO: 3253 - RNA, 21 nt, synthetic construct
  misc_feature 1..21: note = Description of Artificial Sequence: Synthetic oligonucleotide
  source 1..21: mol_type = other RNA
ccacagctatatcctgatgct

SEQ ID NO: 3254 - RNA, 21 nt, synthetic construct
  misc_feature 1..21: note = Description of Artificial Sequence: Synthetic oligonucleotide
  source 1..21: mol_type = other RNA
cttcactgaacatgcctagta

SEQ ID NO: 3255 - RNA, 21 nt, synthetic construct
  misc_feature 1..21: note = Description of Artificial Sequence: Synthetic oligonucleotide
  source 1..21: mol_type = other RNA
gtggttgagagtgcttatgaa

SEQ ID NO: 3256 - RNA, 21 nt, synthetic construct
  misc_feature 1..21: note = Description of Artificial Sequence: Synthetic oligonucleotide
  source 1..21: mol_type = other RNA
caaactcaaaggctacacata

SEQ ID NO: 3257 - RNA, 21 nt, synthetic construct
  misc_feature 1..21: note = Description of Artificial Sequence: Synthetic oligonucleotide
  source 1..21: mol_type = other RNA
atatcagtagtgtacattaca

SEQ ID NO: 3258 - RNA, 21 nt, synthetic construct
  misc_feature 1..21: note = Description of Artificial Sequence: Synthetic oligonucleotide
  source 1..21: mol_type = other RNA
caaccaactatccaagtgtta

SEQ ID NO: 3259 - RNA, 21 nt, synthetic construct
  misc_feature 1..21: note = Description of Artificial Sequence: Synthetic oligonucleotide
  source 1..21: mol_type = other RNA
tcatcgaagacaaattgaaga

SEQ ID NO: 3260 - RNA, 21 nt, synthetic construct
  misc_feature 1..21: note = Description of Artificial Sequence: Synthetic oligonucleotide
  source 1..21: mol_type = other RNA
gcagatttggcagagagtata

SEQ ID NO: 3261 - RNA, 21 nt, synthetic construct
  misc_feature 1..21: note = Description of Artificial Sequence: Synthetic oligonucleotide
  source 1..21: mol_type = other RNA
ctccttcactgaacatgccta

SEQ ID NO: 3262 - RNA, 21 nt, synthetic construct
  misc_feature 1..21: note = Description of Artificial Sequence: Synthetic oligonucleotide
  source 1..21: mol_type = other RNA
catgcctagtccaacattttt

SEQ ID NO: 3263 - RNA, 21 nt, synthetic construct
  misc_feature 1..21: note = Description of Artificial Sequence: Synthetic oligonucleotide
  source 1..21: mol_type = other RNA
tgccatcagtatcttaatgaa

SEQ ID NO: 3264 - RNA, 21 nt, synthetic construct
  misc_feature 1..21: note = Description of Artificial Sequence: Synthetic oligonucleotide
  source 1..21: mol_type = other RNA
gccatcagtatcttaatgaaa

SEQ ID NO: 3265 - RNA, 21 nt, synthetic construct
  misc_feature 1..21: note = Description of Artificial Sequence: Synthetic oligonucleotide
  source 1..21: mol_type = other RNA
ttagaacaccaaagattgtct

SEQ ID NO: 3266 - RNA, 21 nt, synthetic construct
  misc_feature 1..21: note = Description of Artificial Sequence: Synthetic oligonucleotide
  source 1..21: mol_type = other RNA
atcatttcactgtctaggcta

SEQ ID NO: 3267 - RNA, 21 nt, synthetic construct
  misc_feature 1..21: note = Description of Artificial Sequence: Synthetic oligonucleotide
  source 1..21: mol_type = other RNA
tcactgtctaggctacaacaa

SEQ ID NO: 3268 - RNA, 21 nt, synthetic construct
  misc_feature 1..21: note = Description of Artificial Sequence: Synthetic oligonucleotide
  source 1..21: mol_type = other RNA
ggatccagtgtataaatccaa

SEQ ID NO: 3269 - RNA, 21 nt, synthetic construct
  misc_feature 1..21: note = Description of Artificial Sequence: Synthetic oligonucleotide
  source 1..21: mol_type = other RNA
caactatccaagtgttataca

SEQ ID NO: 3270 - RNA, 21 nt, synthetic construct
  misc_feature 1..21: note = Description of Artificial Sequence: Synthetic oligonucleotide
  source 1..21: mol_type = other RNA
ttggttccaagtccaatatga

SEQ ID NO: 3271 - RNA, 21 nt, synthetic construct
  misc_feature 1..21: note = Description of Artificial Sequence: Synthetic oligonucleotide
  source 1..21: mol_type = other RNA
tgcttatgaggtgatcaaact

SEQ ID NO: 3272 - RNA, 21 nt, synthetic construct
  misc_feature 1..21: note = Description of Artificial Sequence: Synthetic oligonucleotide
  source 1..21: mol_type = other RNA
aaactcaaaggctacacatca

SEQ ID NO: 3273 - RNA, 21 nt, synthetic construct
  misc_feature 1..21: note = Description of Artificial Sequence: Synthetic oligonucleotide
  source 1..21: mol_type = other RNA
tctcagaccttgtgaaggtga

SEQ ID NO: 3274 - RNA, 21 nt, synthetic construct
  misc_feature 1..21: note = Description of Artificial Sequence: Synthetic oligonucleotide
  source 1..21: mol_type = other RNA
taaaatccacagctatatcct

SEQ ID NO: 3275 - RNA, 21 nt, synthetic construct
  misc_feature 1..21: note = Description of Artificial Sequence: Synthetic oligonucleotide
  source 1..21: mol_type = other RNA
ccttcactgaacatgcctagt

SEQ ID NO: 3276 - RNA, 21 nt, synthetic construct
  misc_feature 1..21: note = Description of Artificial Sequence: Synthetic oligonucleotide
  source 1..21: mol_type = other RNA
gggatccagtgtataaatcca

SEQ ID NO: 3277 - RNA, 21 nt, synthetic construct
  misc_feature 1..21: note = Description of Artificial Sequence: Synthetic oligonucleotide
  source 1..21: mol_type = other RNA
caataaaccttgaacagtgaa

SEQ ID NO: 3278 - RNA, 21 nt, synthetic construct
  misc_feature 1..21: note = Description of Artificial Sequence: Synthetic oligonucleotide
  source 1..21: mol_type = other RNA
ggcctgtgccatcagtatctt

SEQ ID NO: 3279 - RNA, 21 nt, synthetic construct
  misc_feature 1..21: note = Description of Artificial Sequence: Synthetic oligonucleotide
  source 1..21: mol_type = other RNA
ttgttgatgtcatcgaagaca

SEQ ID NO: 3280 - RNA, 21 nt, synthetic construct
  misc_feature 1..21: note = Description of Artificial Sequence: Synthetic oligonucleotide
  source 1..21: mol_type = other RNA
ggatcttattttgtgaactat

SEQ ID NO: 3281 - RNA, 21 nt, synthetic construct
  misc_feature 1..21: note = Description of Artificial Sequence: Synthetic oligonucleotide
  source 1..21: mol_type = other RNA
aaggatcttattttgtgaact

SEQ ID NO: 3282 - RNA, 21 nt, synthetic construct
  misc_feature 1..21: note = Description of Artificial Sequence: Synthetic oligonucleotide
  source 1..21: mol_type = other RNA
atcatgtcttgtgcataatta

SEQ ID NO: 3283 - RNA, 21 nt, synthetic construct
  misc_feature 1..21: note = Description of Artificial Sequence: Synthetic oligonucleotide
  source 1..21: mol_type = other RNA
tgtcatatcatttcactgtct

SEQ ID NO: 3284 - RNA, 21 nt, synthetic construct
  misc_feature 1..21: note = Description of Artificial Sequence: Synthetic oligonucleotide
  source 1..21: mol_type = other RNA
tcatatcatttcactgtctaa

SEQ ID NO: 3285 - RNA, 21 nt, synthetic construct
  misc_feature 1..21: note = Description of Artificial Sequence: Synthetic oligonucleotide
  source 1..21: mol_type = other RNA
atttataatcttctaaaggaa

SEQ ID NO: 3286 - RNA, 21 nt, synthetic construct
  misc_feature 1..21: note = Description of Artificial Sequence: Synthetic oligonucleotide
  source 1..21: mol_type = other RNA
tggtttgtaaaatccacagct

SEQ ID NO: 3287 - RNA, 21 nt, synthetic construct
  misc_feature 1..21: note = Description of Artificial Sequence: Synthetic oligonucleotide
  source 1..21: mol_type = other RNA
atgctggatggtattaatctt

SEQ ID NO: 3288 - RNA, 21 nt, synthetic construct
  misc_feature 1..21: note = Description of Artificial Sequence: Synthetic oligonucleotide
  source 1..21: mol_type = other RNA
aactatatcagtagtgtacat

SEQ ID NO: 3289 - RNA, 21 nt, synthetic construct
  misc_feature 1..21: note = Description of Artificial Sequence: Synthetic oligonucleotide
  source 1..21: mol_type = other RNA
atcaactcctgaagttagaaa

SEQ ID NO: 3290 - RNA, 21 nt, synthetic construct
  misc_feature 1..21: note = Description of Artificial Sequence: Synthetic oligonucleotide
  source 1..21: mol_type = other RNA
ctggatggtattaatcttgta

SEQ ID NO: 3291 - RNA, 21 nt, synthetic construct
  misc_feature 1..21: note = Description of Artificial Sequence: Synthetic oligonucleotide
  source 1..21: mol_type = other RNA
tatcatttcactgtctaggct

SEQ ID NO: 3292 - RNA, 21 nt, synthetic construct
  misc_feature 1..21: note = Description of Artificial Sequence: Synthetic oligonucleotide
  source 1..21: mol_type = other RNA
gtaaaatccacagctatatca

SEQ ID NO: 3293 - RNA, 21 nt, synthetic construct
  misc_feature 1..21: note = Description of Artificial Sequence: Synthetic oligonucleotide
  source 1..21: mol_type = other RNA
tccttagtgttccttgcattt

SEQ ID NO: 3294 - RNA, 21 nt, synthetic construct
  misc_feature 1..21: note = Description of Artificial Sequence: Synthetic oligonucleotide
  source 1..21: mol_type = other RNA
catatcatttcactgtctaga

SEQ ID NO: 3295 - RNA, 21 nt, synthetic construct
  misc_feature 1..21: note = Description of Artificial Sequence: Synthetic oligonucleotide
  source 1..21: mol_type = other RNA
aacatcaactcctgaagttaa

SEQ ID NO: 3296 - RNA, 21 nt, synthetic construct
  misc_feature 1..21: note = Description of Artificial Sequence: Synthetic oligonucleotide
  source 1..21: mol_type = other RNA
cctgatgctggatggtattaa

SEQ ID NO: 3297 - RNA, 21 nt, synthetic construct
  misc_feature 1..21: note = Description of Artificial Sequence: Synthetic oligonucleotide
  source 1..21: mol_type = other RNA
aatgcaaccaactatccaagt

SEQ ID NO: 3298 - RNA, 21 nt, synthetic construct
  misc_feature 1..21: note = Description of Artificial Sequence: Synthetic oligonucleotide
  source 1..21: mol_type = other RNA
tttacggaataaaggatgata

SEQ ID NO: 3299 - RNA, 21 nt, synthetic construct
  misc_feature 1..21: note = Description of Artificial Sequence: Synthetic oligonucleotide
  source 1..21: mol_type = other RNA
ttccttagtgttccttgcatt

SEQ ID NO: 3300 - RNA, 21 nt, synthetic construct
  misc_feature 1..21: note = Description of Artificial Sequence: Synthetic oligonucleotide
  source 1..21: mol_type = other RNA
caatgcaaccaactatccaaa

SEQ ID NO: 3301 - RNA, 21 nt, synthetic construct
  misc_feature 1..21: note = Description of Artificial Sequence: Synthetic oligonucleotide
  source 1..21: mol_type = other RNA
agatttggcagagagtataat

SEQ ID NO: 3302 - RNA, 21 nt, synthetic construct
  misc_feature 1..21: note = Description of Artificial Sequence: Synthetic oligonucleotide
  source 1..21: mol_type = other RNA
tttccaccatgattaagggta

SEQ ID NO: 3303 - RNA, 21 nt, synthetic construct
  misc_feature 1..21: note = Description of Artificial Sequence: Synthetic oligonucleotide
  source 1..21: mol_type = other RNA
actggttagtgtgaaatagtt

SEQ ID NO: 3304 - RNA, 21 nt, synthetic construct
  misc_feature 1..21: note = Description of Artificial Sequence: Synthetic oligonucleotide
  source 1..21: mol_type = other RNA
caagtccaatatggcaactct

SEQ ID NO: 3305 - RNA, 21 nt, synthetic construct
  misc_feature 1..21: note = Description of Artificial Sequence: Synthetic oligonucleotide
  source 1..21: mol_type = other RNA
tccaccatgattaagggtctt

SEQ ID NO: 3306 - RNA, 21 nt, synthetic construct
  misc_feature 1..21: note = Description of Artificial Sequence: Synthetic oligonucleotide
  source 1..21: mol_type = other RNA
tcatttcactgtctaggctaa

SEQ ID NO: 3307 - RNA, 21 nt, synthetic construct
  misc_feature 1..21: note = Description of Artificial Sequence: Synthetic oligonucleotide
  source 1..21: mol_type = other RNA
tgtcctttttatctgatctgt

SEQ ID NO: 3308 - RNA, 21 nt, synthetic construct
  misc_feature 1..21: note = Description of Artificial Sequence: Synthetic oligonucleotide
  source 1..21: mol_type = other RNA
ccagtgtataaatccaatata

SEQ ID NO: 3309 - RNA, 21 nt, synthetic construct
  misc_feature 1..21: note = Description of Artificial Sequence: Synthetic oligonucleotide
  source 1..21: mol_type = other RNA
tccaagtgttataccaactaa

SEQ ID NO: 3310 - RNA, 21 nt, synthetic construct
  misc_feature 1..21: note = Description of Artificial Sequence: Synthetic oligonucleotide
  source 1..21: mol_type = other RNA
gaacaccaaagattgtctcta

SEQ ID NO: 3311 - RNA, 21 nt, synthetic construct
  misc_feature 1..21: note = Description of Artificial Sequence: Synthetic oligonucleotide
  source 1..21: mol_type = other RNA
aacaccaaagattgtctctga

SEQ ID NO: 3312 - RNA, 21 nt, synthetic construct
  misc_feature 1..21: note = Description of Artificial Sequence: Synthetic oligonucleotide
  source 1..21: mol_type = other RNA
atgttgtcctttttatctgat

SEQ ID NO: 3313 - RNA, 21 nt, synthetic construct
  misc_feature 1..21: note = Description of Artificial Sequence: Synthetic oligonucleotide
  source 1..21: mol_type = other RNA
tcaactcctgaagttagaaat

SEQ ID NO: 3314 - RNA, 21 nt, synthetic construct
  misc_feature 1..21: note = Description of Artificial Sequence: Synthetic oligonucleotide
  source 1..21: mol_type = other RNA
aactatccaagtgttatacca

SEQ ID NO: 3315 - RNA, 21 nt, synthetic construct
  misc_feature 1..21: note = Description of Artificial Sequence: Synthetic oligonucleotide
  source 1..21: mol_type = other RNA
ggtattaatcttgtgtagtct

SEQ ID NO: 3316 - RNA, 21 nt, synthetic construct
  misc_feature 1..21: note = Description of Artificial Sequence: Synthetic oligonucleotide
  source 1..21: mol_type = other RNA
ggctccttcactgaacatgca

SEQ ID NO: 3317 - RNA, 21 nt, synthetic construct
  misc_feature 1..21: note = Description of Artificial Sequence: Synthetic oligonucleotide
  source 1..21: mol_type = other RNA
tatcagtagtgtacattacca

SEQ ID NO: 3318 - RNA, 21 nt, synthetic construct
  misc_feature 1..21: note = Description of Artificial Sequence: Synthetic oligonucleotide
  source 1..21: mol_type = other RNA
cagccttttccttagaacaca

SEQ ID NO: 3319 - RNA, 21 nt, synthetic construct
  misc_feature 1..21: note = Description of Artificial Sequence: Synthetic oligonucleotide
  source 1..21: mol_type = other RNA
ctggttagtgtgaaatagtta

SEQ ID NO: 3320 - RNA, 21 nt, synthetic construct
  misc_feature 1..21: note = Description of Artificial Sequence: Synthetic oligonucleotide
  source 1..21: mol_type = other RNA
actatatcagtagtgtacatt

SEQ ID NO: 3321 - RNA, 21 nt, synthetic construct
  misc_feature 1..21: note = Description of Artificial Sequence: Synthetic oligonucleotide
  source 1..21: mol_type = other RNA
tatatcagtagtgtacattaa

SEQ ID NO: 3322 - RNA, 21 nt, synthetic construct
  misc_feature 1..21: note = Description of Artificial Sequence: Synthetic oligonucleotide
  source 1..21: mol_type = other RNA
gtaatattttaagatggacta

SEQ ID NO: 3323 - RNA, 21 nt, synthetic construct
  misc_feature 1..21: note = Description of Artificial Sequence: Synthetic oligonucleotide
  source 1..21: mol_type = other RNA
ttttaagatggactgggaaaa

SEQ ID NO: 3324 - RNA, 21 nt, synthetic construct
  misc_feature 1..21: note = Description of Artificial Sequence: Synthetic oligonucleotide
  source 1..21: mol_type = other RNA
ttcactgaacatgcctagtca

SEQ ID NO: 3325 - RNA, 21 nt, synthetic construct
  misc_feature 1..21: note = Description of Artificial Sequence: Synthetic oligonucleotide
  source 1..21: mol_type = other RNA
accaactatccaagtgttata

SEQ ID NO: 3326 - RNA, 21 nt, synthetic construct
  misc_feature 1..21: note = Description of Artificial Sequence: Synthetic oligonucleotide
  source 1..21: mol_type = other RNA
ccaagtgttataccaactaaa

SEQ ID NO: 3327 - RNA, 21 nt, synthetic construct
  misc_feature 1..21: note = Description of Artificial Sequence: Synthetic oligonucleotide
  source 1..21: mol_type = other RNA
agtaatattttaagatggact

SEQ ID NO: 3328 - RNA, 21 nt, synthetic construct
  misc_feature 1..21: note = Description of Artificial Sequence: Synthetic oligonucleotide
  source 1..21: mol_type = other RNA
aaaatccacagctatatccta

SEQ ID NO: 3329 - RNA, 21 nt, synthetic construct
  misc_feature 1..21: note = Description of Artificial Sequence: Synthetic oligonucleotide
  source 1..21: mol_type = other RNA
tccttcactgaacatgcctaa

SEQ ID NO: 3330 - RNA, 21 nt, synthetic construct
  misc_feature 1..21: note = Description of Artificial Sequence: Synthetic oligonucleotide
  source 1..21: mol_type = other RNA
cactgaacatgcctagtccaa

SEQ ID NO: 3331 - RNA, 21 nt, synthetic construct
  misc_feature 1..21: note = Description of Artificial Sequence: Synthetic oligonucleotide
  source 1..21: mol_type = other RNA
aagtgttataccaactaaaac

SEQ ID NO: 3332 - RNA, 21 nt, synthetic construct
  misc_feature 1..21: note = Description of Artificial Sequence: Synthetic oligonucleotide
  source 1..21: mol_type = other RNA
ttccaccatgattaagggtct

SEQ ID NO: 3333 - RNA, 21 nt, synthetic construct
  misc_feature 1..21: note = Description of Artificial Sequence: Synthetic oligonucleotide
  source 1..21: mol_type = other RNA
gaacatgcctagtccaacatt

SEQ ID NO: 3334 - RNA, 21 nt, synthetic construct
  misc_feature 1..21: note = Description of Artificial Sequence: Synthetic oligonucleotide
  source 1..21: mol_type = other RNA
atcagtagtgtacattaccat

SEQ ID NO: 3335 - RNA, 21 nt, synthetic construct
  misc_feature 1..21: note = Description of Artificial Sequence: Synthetic oligonucleotide
  source 1..21: mol_type = other RNA
atccaagtgttataccaacta

SEQ ID NO: 3336 - RNA, 21 nt, synthetic construct
  misc_feature 1..21: note = Description of Artificial Sequence: Synthetic oligonucleotide
  source 1..21: mol_type = other RNA
ccaagtccaatatggcaacta

SEQ ID NO: 3337 - RNA, 21 nt, synthetic construct
  misc_feature 1..21: note = Description of Artificial Sequence: Synthetic oligonucleotide
  source 1..21: mol_type = other RNA
catttcactgtctaggctaca

SEQ ID NO: 3338 - RNA, 21 nt, synthetic construct
  misc_feature 1..21: note = Description of Artificial Sequence: Synthetic oligonucleotide
  source 1..21: mol_type = other RNA
ccacagctatatcctgatgct

SEQ ID NO: 3339 - RNA, 21 nt, synthetic construct
  misc_feature 1..21: note = Description of Artificial Sequence: Synthetic oligonucleotide
  source 1..21: mol_type = other RNA
cttcactgaacatgcctagta

SEQ ID NO: 3340 - RNA, 21 nt, synthetic construct
  misc_feature 1..21: note = Description of Artificial Sequence: Synthetic oligonucleotide
  source 1..21: mol_type = other RNA
gtggttgagagtgcttatgaa

SEQ ID NO: 3341 - RNA, 21 nt, synthetic construct
  misc_feature 1..21: note = Description of Artificial Sequence: Synthetic oligonucleotide
  source 1..21: mol_type = other RNA
atatcagtagtgtacattaca

SEQ ID NO: 3342 - RNA, 21 nt, synthetic construct
  misc_feature 1..21: note = Description of Artificial Sequence: Synthetic oligonucleotide
  source 1..21: mol_type = other RNA
caaccaactatccaagtgtta

SEQ ID NO: 3343 - RNA, 21 nt, synthetic construct
  misc_feature 1..21: note = Description of Artificial Sequence: Synthetic oligonucleotide
  source 1..21: mol_type = other RNA
gcagatttggcagagagtata

SEQ ID NO: 3344 - RNA, 21 nt, synthetic construct
  misc_feature 1..21: note = Description of Artificial Sequence: Synthetic oligonucleotide
  source 1..21: mol_type = other RNA
ctccttcactgaacatgccta

SEQ ID NO: 3345 - RNA, 21 nt, synthetic construct
  misc_feature 1..21: note = Description of Artificial Sequence: Synthetic oligonucleotide
  source 1..21: mol_type = other RNA
catgcctagtccaacattttt

SEQ ID NO: 3346 - RNA, 21 nt, synthetic construct
  misc_feature 1..21: note = Description of Artificial Sequence: Synthetic oligonucleotide
  source 1..21: mol_type = other RNA
tgccatcagtatcttaatgaa

SEQ ID NO: 3347 - RNA, 21 nt, synthetic construct
  misc_feature 1..21: note = Description of Artificial Sequence: Synthetic oligonucleotide
  source 1..21: mol_type = other RNA
gccatcagtatcttaatgaaa

SEQ ID NO: 3348 - RNA, 21 nt, synthetic construct
  misc_feature 1..21: note = Description of Artificial Sequence: Synthetic oligonucleotide
  source 1..21: mol_type = other RNA
ttagaacaccaaagattgtct

SEQ ID NO: 3349 - RNA, 21 nt, synthetic construct
  misc_feature 1..21: note = Description of Artificial Sequence: Synthetic oligonucleotide
  source 1..21: mol_type = other RNA
atcatttcactgtctaggcta

SEQ ID NO: 3350 - RNA, 21 nt, synthetic construct
  misc_feature 1..21: note = Description of Artificial Sequence: Synthetic oligonucleotide
  source 1..21: mol_type = other RNA
tcactgtctaggctacaacaa

SEQ ID NO: 3351 - RNA, 21 nt, synthetic construct
  misc_feature 1..21: note = Description of Artificial Sequence: Synthetic oligonucleotide
  source 1..21: mol_type = other RNA
caactatccaagtgttataca

SEQ ID NO: 3352 - RNA, 21 nt, synthetic construct
  misc_feature 1..21: note = Description of Artificial Sequence: Synthetic oligonucleotide
  source 1..21: mol_type = other RNA
ttggttccaagtccaatatga

SEQ ID NO: 3353 - RNA, 21 nt, synthetic construct
  misc_feature 1..21: note = Description of Artificial Sequence: Synthetic oligonucleotide
  source 1..21: mol_type = other RNA
tgcttatgaggtgatcaaact

SEQ ID NO: 3354 - RNA, 21 nt, synthetic construct
  misc_feature 1..21: note = Description of Artificial Sequence: Synthetic oligonucleotide
  source 1..21: mol_type = other RNA
tctcagaccttgtgaaggtga

SEQ ID NO: 3355 - RNA, 21 nt, synthetic construct
  misc_feature 1..21: note = Description of Artificial Sequence: Synthetic oligonucleotide
  source 1..21: mol_type = other RNA
taaaatccacagctatatcct

SEQ ID NO: 3356 - RNA, 21 nt, synthetic construct
  misc_feature 1..21: note = Description of Artificial Sequence: Synthetic oligonucleotide
  source 1..21: mol_type = other RNA
ccttcactgaacatgcctagt

SEQ ID NO: 3357 - RNA, 21 nt, synthetic construct
  misc_feature 1..21: note = Description of Artificial Sequence: Synthetic oligonucleotide
  source 1..21: mol_type = other RNA
gggatccagtgtataaatcca

SEQ ID NO: 3358 - RNA, 21 nt, synthetic construct
  misc_feature 1..21: note = Description of Artificial Sequence: Synthetic oligonucleotide
  source 1..21: mol_type = other RNA
caataaaccttgaacagtgaa

SEQ ID NO: 3359 - RNA, 21 nt, synthetic construct
  misc_feature 1..21: note = Description of Artificial Sequence: Synthetic oligonucleotide
  source 1..21: mol_type = other RNA
ggcctgtgccatcagtatctt

SEQ ID NO: 3360 - RNA, 21 nt, synthetic construct
  misc_feature 1..21: note = Description of Artificial Sequence: Synthetic oligonucleotide
  source 1..21: mol_type = other RNA
ttgttgatgtcatcgaagaca

SEQ ID NO: 3361 - RNA, 21 nt, synthetic construct
  misc_feature 1..21: note = Description of Artificial Sequence: Synthetic oligonucleotide
  source 1..21: mol_type = other RNA
agatttggcagagagtataat

SEQ ID NO: 3362 - RNA, 21 nt, synthetic construct
  misc_feature 1..21: note = Description of Artificial Sequence: Synthetic oligonucleotide
  source 1..21: mol_type = other RNA
tttccaccatgattaagggta

SEQ ID NO: 3363 - RNA, 21 nt, synthetic construct
  misc_feature 1..21: note = Description of Artificial Sequence: Synthetic oligonucleotide
  source 1..21: mol_type = other RNA
ctaggctacaacaggattcta

SEQ ID NO: 3364 - RNA, 21 nt, synthetic construct
  misc_feature 1..21: note = Description of Artificial Sequence: Synthetic oligonucleotide
  source 1..21: mol_type = other RNA
tggaggttgtgcatgttgtca

SEQ ID NO: 3365 - RNA, 21 nt, synthetic construct
  misc_feature 1..21: note = Description of Artificial Sequence: Synthetic oligonucleotide
  source 1..21: mol_type = other RNA
gctccttcactgaacatgcct

SEQ ID NO: 3366 - RNA, 21 nt, synthetic construct
  misc_feature 1..21: note = Description of Artificial Sequence: Synthetic oligonucleotide
  source 1..21: mol_type = other RNA
cttttggttccaagtccaata

SEQ ID NO: 3367 - RNA, 21 nt, synthetic construct
  misc_feature 1..21: note = Description of Artificial Sequence: Synthetic oligonucleotide
  source 1..21: mol_type = other RNA
gcctgtgccatcagtatctta

SEQ ID NO: 3368 - RNA, 21 nt, synthetic construct
  misc_feature 1..21: note = Description of Artificial Sequence: Synthetic oligonucleotide
  source 1..21: mol_type = other RNA
gcttatgaggtgatcaaacta

SEQ ID NO: 3369 - RNA, 21 nt, synthetic construct
  misc_feature 1..21: note = Description of Artificial Sequence: Synthetic oligonucleotide
  source 1..21: mol_type = other RNA
cttatgaggtgatcaaactca

SEQ ID NO: 3370 - RNA, 21 nt, synthetic construct
  misc_feature 1..21: note = Description of Artificial Sequence: Synthetic oligonucleotide
  source 1..21: mol_type = other RNA
ccttgcattttgggacagaat

SEQ ID NO: 3371 - RNA, 21 nt, synthetic construct
  misc_feature 1..21: note = Description of Artificial Sequence: Synthetic oligonucleotide
  source 1..21: mol_type = other RNA
ggttccaagtccaatatggca

SEQ ID NO: 3372 - RNA, 21 nt, synthetic construct
  misc_feature 1..21: note = Description of Artificial Sequence: Synthetic oligonucleotide
  source 1..21: mol_type = other RNA
cactgtctaggctacaacaga

SEQ ID NO: 3373 - RNA, 21 nt, synthetic construct
  misc_feature 1..21: note = Description of Artificial Sequence: Synthetic oligonucleotide
  source 1..21: mol_type = other RNA
actgtctaggctacaacagga

SEQ ID NO: 3374 - RNA, 21 nt, synthetic construct
  misc_feature 1..21: note = Description of Artificial Sequence: Synthetic oligonucleotide
  source 1..21: mol_type = other RNA
aataagattacagttgttgga

SEQ ID NO: 3375 - RNA, 21 nt, synthetic construct
  misc_feature 1..21: note = Description of Artificial Sequence: Synthetic oligonucleotide
  source 1..21: mol_type = other RNA
gttgagagtgcttatgaggta

SEQ ID NO: 3376 - RNA, 21 nt, synthetic construct
  misc_feature 1..21: note = Description of Artificial Sequence: Synthetic oligonucleotide
  source 1..21: mol_type = other RNA
gtctaggctacaacaggatta

SEQ ID NO: 3377 - RNA, 21 nt, synthetic construct
  misc_feature 1..21: note = Description of Artificial Sequence: Synthetic oligonucleotide
  source 1..21: mol_type = other RNA
tctaggctacaacaggattct

SEQ ID NO: 3378 - RNA, 21 nt, synthetic construct
  misc_feature 1..21: note = Description of Artificial Sequence: Synthetic oligonucleotide
  source 1..21: mol_type = other RNA
gtggaggttgtgcatgttgta

SEQ ID NO: 3379 - RNA, 21 nt, synthetic construct
  misc_feature 1..21: note = Description of Artificial Sequence: Synthetic oligonucleotide
  source 1..21: mol_type = other RNA
tgaggtgatcaaactcaaaga

SEQ ID NO: 3380 - RNA, 21 nt, synthetic construct
  misc_feature 1..21: note = Description of Artificial Sequence: Synthetic oligonucleotide
  source 1..21: mol_type = other RNA
gtgatcaaactcaaaggctaa

SEQ ID NO: 3381 - RNA, 21 nt, synthetic construct
  misc_feature 1..21: note = Description of Artificial Sequence: Synthetic oligonucleotide
  source 1..21: mol_type = other RNA
tgaggaagaggcccgtttgaa

SEQ ID NO: 3382 - RNA, 21 nt, synthetic construct
  misc_feature 1..21: note = Description of Artificial Sequence: Synthetic oligonucleotide
  source 1..21: mol_type = other RNA
acaagcaggtggttgagagta

SEQ ID NO: 3383 - RNA, 21 nt, synthetic construct
  misc_feature 1..21: note = Description of Artificial Sequence: Synthetic oligonucleotide
  source 1..21: mol_type = other RNA
cagatttggcagagagtataa

SEQ ID NO: 3384 - RNA, 21 nt, synthetic construct
  misc_feature 1..21: note = Description of Artificial Sequence: Synthetic oligonucleotide
  source 1..21: mol_type = other RNA
gtgcttatgaggtgatcaaac

SEQ ID NO: 3385 - RNA, 21 nt, synthetic construct
  misc_feature 1..21: note = Description of Artificial Sequence: Synthetic oligonucleotide
  source 1..21: mol_type = other RNA
agcagatttggcagagagtat

SEQ ID NO: 3386 - RNA, 21 nt, synthetic construct
  misc_feature 1..21: note = Description of Artificial Sequence: Synthetic oligonucleotide
  source 1..21: mol_type = other RNA
atttggcagagagtataatga

SEQ ID NO: 3387 - RNA, 21 nt, synthetic construct
  misc_feature 1..21: note = Description of Artificial Sequence: Synthetic oligonucleotide
  source 1..21: mol_type = other RNA
tttggcagagagtataatgaa

SEQ ID NO: 3388 - RNA, 21 nt, synthetic construct
  misc_feature 1..21: note = Description of Artificial Sequence: Synthetic oligonucleotide
  source 1..21: mol_type = other RNA
cttgcattttgggacagaata

SEQ ID NO: 3389 - RNA, 21 nt, synthetic construct
  misc_feature 1..21: note = Description of Artificial Sequence: Synthetic oligonucleotide
  source 1..21: mol_type = other RNA
atggaatctcagaccttgtga

SEQ ID NO: 3390 - RNA, 21 nt, synthetic construct
  misc_feature 1..21: note = Description of Artificial Sequence: Synthetic oligonucleotide
  source 1..21: mol_type = other RNA
cacagctatatcctgatgcta

SEQ ID NO: 3391 - RNA, 21 nt, synthetic construct
  misc_feature 1..21: note = Description of Artificial Sequence: Synthetic oligonucleotide
  source 1..21: mol_type = other RNA
gaggaagaggcccgtttgaaa

SEQ ID NO: 3392 - RNA, 21 nt, synthetic construct
  misc_feature 1..21: note = Description of Artificial Sequence: Synthetic oligonucleotide
  source 1..21: mol_type = other RNA
tctgaggaagaggcccgttta

SEQ ID NO: 3393 - RNA, 21 nt, synthetic construct
  misc_feature 1..21: note = Description of Artificial Sequence: Synthetic oligonucleotide
  source 1..21: mol_type = other RNA
cacatcctgggatccagtgta

SEQ ID NO: 3394 - RNA, 21 nt, synthetic construct
  misc_feature 1..21: note = Description of Artificial Sequence: Synthetic oligonucleotide
  source 1..21: mol_type = other RNA
agccttttccttagaacacca

SEQ ID NO: 3395 - RNA, 21 nt, synthetic construct
  misc_feature 1..21: note = Description of Artificial Sequence: Synthetic oligonucleotide
  source 1..21: mol_type = other RNA
tcaactggttagtgtgaaata

SEQ ID NO: 3396 - RNA, 23 nt, synthetic construct
  misc_feature 1..23: note = Description of Artificial Sequence: Synthetic oligonucleotide
  source 1..23: mol_type = other RNA
tttaatcacagatcagataaaaa

SEQ ID NO: 3397 - RNA, 23 nt, synthetic construct
  misc_feature 1..23: note = Description of Artificial Sequence: Synthetic oligonucleotide
  source 1..23: mol_type = other RNA
aactatttcacactaaccagttg

SEQ ID NO: 3398 - RNA, 23 nt, synthetic construct
  misc_feature 1..23: note = Description of Artificial Sequence: Synthetic oligonucleotide
  source 1..23: mol_type = other RNA
aaatgttggactaggcatgttca

SEQ ID NO: 3399 - RNA, 23 nt, synthetic construct
  misc_feature 1..23: note = Description of Artificial Sequence: Synthetic oligonucleotide
  source 1..23: mol_type = other RNA
agagttgccatattggacttgga

SEQ ID NO: 3400 - RNA, 23 nt, synthetic construct
  misc_feature 1..23: note = Description of Artificial Sequence: Synthetic oligonucleotide
  source 1..23: mol_type = other RNA
aagacccttaatcatggtggaaa

SEQ ID NO: 3401 - RNA, 23 nt, synthetic construct
  misc_feature 1..23: note = Description of Artificial Sequence: Synthetic oligonucleotide
  source 1..23: mol_type = other RNA
ttagcctagacagtgaaatgata

SEQ ID NO: 3402 - RNA, 23 nt, synthetic construct
  misc_feature 1..23: note = Description of Artificial Sequence: Synthetic oligonucleotide
  source 1..23: mol_type = other RNA
acagatcagataaaaaggacaac

SEQ ID NO: 3403 - RNA, 23 nt, synthetic construct
  misc_feature 1..23: note = Description of Artificial Sequence: Synthetic oligonucleotide
  source 1..23: mol_type = other RNA
tatattggatttatacactggat

SEQ ID NO: 3404 - RNA, 23 nt, synthetic construct
  misc_feature 1..23: note = Description of Artificial Sequence: Synthetic oligonucleotide
  source 1..23: mol_type = other RNA
ttagttggtataacacttggata

SEQ ID NO: 3405 - RNA, 23 nt, synthetic construct
  misc_feature 1..23: note = Description of Artificial Sequence: Synthetic oligonucleotide
  source 1..23: mol_type = other RNA
tttcaatttgtcttcgatgacat

SEQ ID NO: 3406 - RNA, 23 nt, synthetic construct
  misc_feature 1..23: note = Description of Artificial Sequence: Synthetic oligonucleotide
  source 1..23: mol_type = other RNA
tagagacaatctttggtgttcta

SEQ ID NO: 3407 - RNA, 23 nt, synthetic construct
  misc_feature 1..23: note = Description of Artificial Sequence: Synthetic oligonucleotide
  source 1..23: mol_type = other RNA
tcagagacaatctttggtgttct

SEQ ID NO: 3408 - RNA, 23 nt, synthetic construct
  misc_feature 1..23: note = Description of Artificial Sequence: Synthetic oligonucleotide
  source 1..23: mol_type = other RNA
atcagataaaaaggacaacatgc

SEQ ID NO: 3409 - RNA, 23 nt, synthetic construct
  misc_feature 1..23: note = Description of Artificial Sequence: Synthetic oligonucleotide
  source 1..23: mol_type = other RNA
atttctaacttcaggagttgatg

SEQ ID NO: 3410 - RNA, 23 nt, synthetic construct
  misc_feature 1..23: note = Description of Artificial Sequence: Synthetic oligonucleotide
  source 1..23: mol_type = other RNA
tggtataacacttggatagttgg

SEQ ID NO: 3411 - RNA, 23 nt, synthetic construct
  misc_feature 1..23: note = Description of Artificial Sequence: Synthetic oligonucleotide
  source 1..23: mol_type = other RNA
taatctttggtgttctaaggaaa

SEQ ID NO: 3412 - RNA, 23 nt, synthetic construct
  misc_feature 1..23: note = Description of Artificial Sequence: Synthetic oligonucleotide
  source 1..23: mol_type = other RNA
agactacacaagattaataccat

SEQ ID NO: 3413 - RNA, 23 nt, synthetic construct
  misc_feature 1..23: note = Description of Artificial Sequence: Synthetic oligonucleotide
  source 1..23: mol_type = other RNA
tgcatgttcagtgaaggagccag

SEQ ID NO: 3414 - RNA, 23 nt, synthetic construct
  misc_feature 1..23: note = Description of Artificial Sequence: Synthetic oligonucleotide
  source 1..23: mol_type = other RNA
tggtaatgtacactactgatata

SEQ ID NO: 3415 - RNA, 23 nt, synthetic construct
  misc_feature 1..23: note = Description of Artificial Sequence: Synthetic oligonucleotide
  source 1..23: mol_type = other RNA
tgtgttctaaggaaaaggctgcc

SEQ ID NO: 3416 - RNA, 23 nt, synthetic construct
  misc_feature 1..23: note = Description of Artificial Sequence: Synthetic oligonucleotide
  source 1..23: mol_type = other RNA
taactatttcacactaaccagtt

SEQ ID NO: 3417 - RNA, 23 nt, synthetic construct
  misc_feature 1..23: note = Description of Artificial Sequence: Synthetic oligonucleotide
  source 1..23: mol_type = other RNA
aatgtacactactgatatagttc

SEQ ID NO: 3418 - RNA, 23 nt, synthetic construct
  misc_feature 1..23: note = Description of Artificial Sequence: Synthetic oligonucleotide
  source 1..23: mol_type = other RNA
ttaatgtacactactgatatagt

SEQ ID NO: 3419 - RNA, 23 nt, synthetic construct
  misc_feature 1..23: note = Description of Artificial Sequence: Synthetic oligonucleotide
  source 1..23: mol_type = other RNA
tagtccatcttaaaatattactg

SEQ ID NO: 3420 - RNA, 23 nt, synthetic construct
  misc_feature 1..23: note = Description of Artificial Sequence: Synthetic oligonucleotide
  source 1..23: mol_type = other RNA
ttttcccagtccatcttaaaata

SEQ ID NO: 3421 - RNA, 23 nt, synthetic construct
  misc_feature 1..23: note = Description of Artificial Sequence: Synthetic oligonucleotide
  source 1..23: mol_type = other RNA
agaactatttcacactaaccagt

SEQ ID NO: 3422 - RNA, 23 nt, synthetic construct
  misc_feature 1..23: note = Description of Artificial Sequence: Synthetic oligonucleotide
  source 1..23: mol_type = other RNA
tgactaggcatgttcagtgaagg

SEQ ID NO: 3423 - RNA, 23 nt, synthetic construct
  misc_feature 1..23: note = Description of Artificial Sequence: Synthetic oligonucleotide
  source 1..23: mol_type = other RNA
tataacacttggatagttggttg

SEQ ID NO: 3424 - RNA, 23 nt, synthetic construct
  misc_feature 1..23: note = Description of Artificial Sequence: Synthetic oligonucleotide
  source 1..23: mol_type = other RNA
tttagttggtataacacttggat

SEQ ID NO: 3425 - RNA, 23 nt, synthetic construct
  misc_feature 1..23: note = Description of Artificial Sequence: Synthetic oligonucleotide
  source 1..23: mol_type = other RNA
tggacttggaaccaaaaggaatc

SEQ ID NO: 3426 - RNA, 23 nt, synthetic construct
  misc_feature 1..23: note = Description of Artificial Sequence: Synthetic oligonucleotide
  source 1..23: mol_type = other RNA
ttgttctaaggaaaaggctgcca

SEQ ID NO: 3427 - RNA, 23 nt, synthetic construct
  misc_feature 1..23: note = Description of Artificial Sequence: Synthetic oligonucleotide
  source 1..23: mol_type = other RNA
agtccatcttaaaatattactgc

SEQ ID NO: 3428 - RNA, 23 nt, synthetic construct
  misc_feature 1..23: note = Description of Artificial Sequence: Synthetic oligonucleotide
  source 1..23: mol_type = other RNA
taggatatagctgtggattttac

SEQ ID NO: 3429 - RNA, 23 nt, synthetic construct
  misc_feature 1..23: note = Description of Artificial Sequence: Synthetic oligonucleotide
  source 1..23: mol_type = other RNA
ttaggcatgttcagtgaaggagc

SEQ ID NO: 3430 - RNA, 23 nt, synthetic construct
  misc_feature 1..23: note = Description of Artificial Sequence: Synthetic oligonucleotide
  source 1..23: mol_type = other RNA
ttggactaggcatgttcagtgaa

SEQ ID NO: 3431 - RNA, 23 nt, synthetic construct
  misc_feature 1..23: note = Description of Artificial Sequence: Synthetic oligonucleotide
  source 1..23: mol_type = other RNA
gttttagttggtataacacttgg

SEQ ID NO: 3432 - RNA, 23 nt, synthetic construct
  misc_feature 1..23: note = Description of Artificial Sequence: Synthetic oligonucleotide
  source 1..23: mol_type = other RNA
agacccttaatcatggtggaaac

SEQ ID NO: 3433 - RNA, 23 nt, synthetic construct
  misc_feature 1..23: note = Description of Artificial Sequence: Synthetic oligonucleotide
  source 1..23: mol_type = other RNA
aatgttggactaggcatgttcag

SEQ ID NO: 3434 - RNA, 23 nt, synthetic construct
  misc_feature 1..23: note = Description of Artificial Sequence: Synthetic oligonucleotide
  source 1..23: mol_type = other RNA
atggtaatgtacactactgatat

SEQ ID NO: 3435 - RNA, 23 nt, synthetic construct
  misc_feature 1..23: note = Description of Artificial Sequence: Synthetic oligonucleotide
  source 1..23: mol_type = other RNA
tagttggtataacacttggatag

SEQ ID NO: 3436 - RNA, 23 nt, synthetic construct
  misc_feature 1..23: note = Description of Artificial Sequence: Synthetic oligonucleotide
  source 1..23: mol_type = other RNA
tagttgccatattggacttggaa

SEQ ID NO: 3437 - RNA, 23 nt, synthetic construct
  misc_feature 1..23: note = Description of Artificial Sequence: Synthetic oligonucleotide
  source 1..23: mol_type = other RNA
taccttcacaaggtctgagattc

SEQ ID NO: 3438 - RNA, 23 nt, synthetic construct
  misc_feature 1..23: note = Description of Artificial Sequence: Synthetic oligonucleotide
  source 1..23: mol_type = other RNA
tgtagcctagacagtgaaatgat

SEQ ID NO: 3439 - RNA, 23 nt, synthetic construct
  misc_feature 1..23: note = Description of Artificial Sequence: Synthetic oligonucleotide
  source 1..23: mol_type = other RNA
agcatcaggatatagctgtggat

SEQ ID NO: 3440 - RNA, 23 nt, synthetic construct
  misc_feature 1..23: note = Description of Artificial Sequence: Synthetic oligonucleotide
  source 1..23: mol_type = other RNA
tactaggcatgttcagtgaagga

SEQ ID NO: 3441 - RNA, 23 nt, synthetic construct
  misc_feature 1..23: note = Description of Artificial Sequence: Synthetic oligonucleotide
  source 1..23: mol_type = other RNA
ttcataagcactctcaaccacct

SEQ ID NO: 3442 - RNA, 23 nt, synthetic construct
  misc_feature 1..23: note = Description of Artificial Sequence: Synthetic oligonucleotide
  source 1..23: mol_type = other RNA
tatgtgtagcctttgagtttgat

SEQ ID NO: 3443 - RNA, 23 nt, synthetic construct
  misc_feature 1..23: note = Description of Artificial Sequence: Synthetic oligonucleotide
  source 1..23: mol_type = other RNA
tgtaatgtacactactgatatag

SEQ ID NO: 3444 - RNA, 23 nt, synthetic construct
  misc_feature 1..23: note = Description of Artificial Sequence: Synthetic oligonucleotide
  source 1..23: mol_type = other RNA
taacacttggatagttggttgca

SEQ ID NO: 3445 - RNA, 23 nt, synthetic construct
  misc_feature 1..23: note = Description of Artificial Sequence: Synthetic oligonucleotide
  source 1..23: mol_type = other RNA
tcttcaatttgtcttcgatgaca

SEQ ID NO: 3446 - RNA, 23 nt, synthetic construct
  misc_feature 1..23: note = Description of Artificial Sequence: Synthetic oligonucleotide
  source 1..23: mol_type = other RNA
tatactctctgccaaatctgcta

SEQ ID NO: 3447 - RNA, 23 nt, synthetic construct
  misc_feature 1..23: note = Description of Artificial Sequence: Synthetic oligonucleotide
  source 1..23: mol_type = other RNA
taggcatgttcagtgaaggagcc

SEQ ID NO: 3448 - RNA, 23 nt, synthetic construct
  misc_feature 1..23: note = Description of Artificial Sequence: Synthetic oligonucleotide
  source 1..23: mol_type = other RNA
aaaaatgttggactaggcatgtt

SEQ ID NO: 3449 - RNA, 23 nt, synthetic construct
  misc_feature 1..23: note = Description of Artificial Sequence: Synthetic oligonucleotide
  source 1..23: mol_type = other RNA
ttcattaagatactgatggcaca

SEQ ID NO: 3450 - RNA, 23 nt, synthetic construct
  misc_feature 1..23: note = Description of Artificial Sequence: Synthetic oligonucleotide
  source 1..23: mol_type = other RNA
tttcattaagatactgatggcac

SEQ ID NO: 3451 - RNA, 23 nt, synthetic construct
  misc_feature 1..23: note = Description of Artificial Sequence: Synthetic oligonucleotide
  source 1..23: mol_type = other RNA
agacaatctttggtgttctaagg

SEQ ID NO: 3452 - RNA, 23 nt, synthetic construct
  misc_feature 1..23: note = Description of Artificial Sequence: Synthetic oligonucleotide
  source 1..23: mol_type = other RNA
tagcctagacagtgaaatgatat

SEQ ID NO: 3453 - RNA, 23 nt, synthetic construct
  misc_feature 1..23: note = Description of Artificial Sequence: Synthetic oligonucleotide
  source 1..23: mol_type = other RNA
ttgttgtagcctagacagtgaaa

SEQ ID NO: 3454 - RNA, 23 nt, synthetic construct
  misc_feature 1..23: note = Description of Artificial Sequence: Synthetic oligonucleotide
  source 1..23: mol_type = other RNA
ttggatttatacactggatccca

SEQ ID NO: 3455 - RNA, 23 nt, synthetic construct
  misc_feature 1..23: note = Description of Artificial Sequence: Synthetic oligonucleotide
  source 1..23: mol_type = other RNA
tgtataacacttggatagttggt

SEQ ID NO: 3456 - RNA, 23 nt, synthetic construct
  misc_feature 1..23: note = Description of Artificial Sequence: Synthetic oligonucleotide
  source 1..23: mol_type = other RNA
tcatattggacttggaaccaaaa

SEQ ID NO: 3457 - RNA, 23 nt, synthetic construct
  misc_feature 1..23: note = Description of Artificial Sequence: Synthetic oligonucleotide
  source 1..23: mol_type = other RNA
agtttgatcacctcataagcact

SEQ ID NO: 3458 - RNA, 23 nt, synthetic construct
  misc_feature 1..23: note = Description of Artificial Sequence: Synthetic oligonucleotide
  source 1..23: mol_type = other RNA
tgatgtgtagcctttgagtttga

SEQ ID NO: 3459 - RNA, 23 nt, synthetic construct
  misc_feature 1..23: note = Description of Artificial Sequence: Synthetic oligonucleotide
  source 1..23: mol_type = other RNA
tcaccttcacaaggtctgagatt

SEQ ID NO: 3460 - RNA, 23 nt, synthetic construct
  misc_feature 1..23: note = Description of Artificial Sequence: Synthetic oligonucleotide
  source 1..23: mol_type = other RNA
aggatatagctgtggattttaca

SEQ ID NO: 3461 - RNA, 23 nt, synthetic construct
  misc_feature 1..23: note = Description of Artificial Sequence: Synthetic oligonucleotide
  source 1..23: mol_type = other RNA
actaggcatgttcagtgaaggag

SEQ ID NO: 3462 - RNA, 23 nt, synthetic construct
  misc_feature 1..23: note = Description of Artificial Sequence: Synthetic oligonucleotide
  source 1..23: mol_type = other RNA
tggatttatacactggatcccag

SEQ ID NO: 3463 - RNA, 23 nt, synthetic construct
  misc_feature 1..23: note = Description of Artificial Sequence: Synthetic oligonucleotide
  source 1..23: mol_type = other RNA
ttcactgttcaaggtttattggg

SEQ ID NO: 3464 - RNA, 23 nt, synthetic construct
  misc_feature 1..23: note = Description of Artificial Sequence: Synthetic oligonucleotide
  source 1..23: mol_type = other RNA
aagatactgatggcacaggccat

SEQ ID NO: 3465 - RNA, 23 nt, synthetic construct
  misc_feature 1..23: note = Description of Artificial Sequence: Synthetic oligonucleotide
  source 1..23: mol_type = other RNA
tgtcttcgatgacatcaacaaga

SEQ ID NO: 3466 - RNA, 23 nt, synthetic construct
  misc_feature 1..23: note = Description of Artificial Sequence: Synthetic oligonucleotide
  source 1..23: mol_type = other RNA
atagttcacaaaataagatcctt

SEQ ID NO: 3467 - RNA, 23 nt, synthetic construct
  misc_feature 1..23: note = Description of Artificial Sequence: Synthetic oligonucleotide
  source 1..23: mol_type = other RNA
agttcacaaaataagatcctttg

SEQ ID NO: 3468 - RNA, 23 nt, synthetic construct
  misc_feature 1..23: note = Description of Artificial Sequence: Synthetic oligonucleotide
  source 1..23: mol_type = other RNA
taattatgcacaagacatgatat

SEQ ID NO: 3469 - RNA, 23 nt, synthetic construct
  misc_feature 1..23: note = Description of Artificial Sequence: Synthetic oligonucleotide
  source 1..23: mol_type = other RNA
agacagtgaaatgatatgacatc

SEQ ID NO: 3470 - RNA, 23 nt, synthetic construct
  misc_feature 1..23: note = Description of Artificial Sequence: Synthetic oligonucleotide
  source 1..23: mol_type = other RNA
ttagacagtgaaatgatatgaca

SEQ ID NO: 3471 - RNA, 23 nt, synthetic construct
  misc_feature 1..23: note = Description of Artificial Sequence: Synthetic oligonucleotide
  source 1..23: mol_type = other RNA
ttcctttagaagattataaatca

SEQ ID NO: 3472 - RNA, 23 nt, synthetic construct
  misc_feature 1..23: note = Description of Artificial Sequence: Synthetic oligonucleotide
  source 1..23: mol_type = other RNA
agctgtggattttacaaaccatt

SEQ ID NO: 3473 - RNA, 23 nt, synthetic construct
  misc_feature 1..23: note = Description of Artificial Sequence: Synthetic oligonucleotide
  source 1..23: mol_type = other RNA
aagattaataccatccagcatca

SEQ ID NO: 3474 - RNA, 23 nt, synthetic construct
  misc_feature 1..23: note = Description of Artificial Sequence: Synthetic oligonucleotide
  source 1..23: mol_type = other RNA
atgtacactactgatatagttca

SEQ ID NO: 3475 - RNA, 23 nt, synthetic construct
  misc_feature 1..23: note = Description of Artificial Sequence: Synthetic oligonucleotide
  source 1..23: mol_type = other RNA
tttctaacttcaggagttgatgt

SEQ ID NO: 3476 - RNA, 23 nt, synthetic construct
  misc_feature 1..23: note = Description of Artificial Sequence: Synthetic oligonucleotide
  source 1..23: mol_type = other RNA
tacaagattaataccatccagca

SEQ ID NO: 3477 - RNA, 23 nt, synthetic construct
  misc_feature 1..23: note = Description of Artificial Sequence: Synthetic oligonucleotide
  source 1..23: mol_type = other RNA
agcctagacagtgaaatgatatg

SEQ ID NO: 3478 - RNA, 23 nt, synthetic construct
  misc_feature 1..23: note = Description of Artificial Sequence: Synthetic oligonucleotide
  source 1..23: mol_type = other RNA
tgatatagctgtggattttacaa

SEQ ID NO: 3479 - RNA, 23 nt, synthetic construct
  misc_feature 1..23: note = Description of Artificial Sequence: Synthetic oligonucleotide
  source 1..23: mol_type = other RNA
aaatgcaaggaacactaaggaag

SEQ ID NO: 3480 - RNA, 23 nt, synthetic construct
  misc_feature 1..23: note = Description of Artificial Sequence: Synthetic oligonucleotide
  source 1..23: mol_type = other RNA
tctagacagtgaaatgatatgac

SEQ ID NO: 3481 - RNA, 23 nt, synthetic construct
  misc_feature 1..23: note = Description of Artificial Sequence: Synthetic oligonucleotide
  source 1..23: mol_type = other RNA
ttaacttcaggagttgatgtttt

SEQ ID NO: 3482 - RNA, 23 nt, synthetic construct
  misc_feature 1..23: note = Description of Artificial Sequence: Synthetic oligonucleotide
  source 1..23: mol_type = other RNA
ttaataccatccagcatcaggat

SEQ ID NO: 3483 - RNA, 23 nt, synthetic construct
  misc_feature 1..23: note = Description of Artificial Sequence: Synthetic oligonucleotide
  source 1..23: mol_type = other RNA
acttggatagttggttgcattgt

SEQ ID NO: 3484 - RNA, 23 nt, synthetic construct
  misc_feature 1..23: note = Description of Artificial Sequence: Synthetic oligonucleotide
  source 1..23: mol_type = other RNA
tatcatcctttattccgtaaaga

SEQ ID NO: 3485 - RNA, 23 nt, synthetic construct
  misc_feature 1..23: note = Description of Artificial Sequence: Synthetic oligonucleotide
  source 1..23: mol_type = other RNA
aatgcaaggaacactaaggaaga

SEQ ID NO: 3486 - RNA, 23 nt, synthetic construct
  misc_feature 1..23: note = Description of Artificial Sequence: Synthetic oligonucleotide
  source 1..23: mol_type = other RNA
tttggatagttggttgcattgtt

SEQ ID NO: 3487 - RNA, 23 nt, synthetic construct
  misc_feature 1..23: note = Description of Artificial Sequence: Synthetic oligonucleotide
  source 1..23: mol_type = other RNA
attatactctctgccaaatctgc

SEQ ID NO: 3488 - RNA, 23 nt, synthetic construct
  misc_feature 1..23: note = Description of Artificial Sequence: Synthetic oligonucleotide
  source 1..23: mol_type = other RNA
tacccttaatcatggtggaaact

SEQ ID NO: 3489 - RNA, 23 nt, synthetic construct
  misc_feature 1..23: note = Description of Artificial Sequence: Synthetic oligonucleotide
  source 1..23: mol_type = other RNA
aactatttcacactaaccagttg

SEQ ID NO: 3490 - RNA, 23 nt, synthetic construct
  misc_feature 1..23: note = Description of Artificial Sequence: Synthetic oligonucleotide
  source 1..23: mol_type = other RNA
agagttgccatattggacttgga

SEQ ID NO: 3491 - RNA, 23 nt, synthetic construct
  misc_feature 1..23: note = Description of Artificial Sequence: Synthetic oligonucleotide
  source 1..23: mol_type = other RNA
aagacccttaatcatggtggaaa

SEQ ID NO: 3492 - RNA, 23 nt, synthetic construct
  misc_feature 1..23: note = Description of Artificial Sequence: Synthetic oligonucleotide
  source 1..23: mol_type = other RNA
ttagcctagacagtgaaatgata

SEQ ID NO: 3493 - RNA, 23 nt, synthetic construct
  misc_feature 1..23: note = Description of Artificial Sequence: Synthetic oligonucleotide
  source 1..23: mol_type = other RNA
acagatcagataaaaaggacaac

SEQ ID NO: 3494 - RNA, 23 nt, synthetic construct
  misc_feature 1..23: note = Description of Artificial Sequence: Synthetic oligonucleotide
  source 1..23: mol_type = other RNA
tatattggatttatacactggat

SEQ ID NO: 3495 - RNA, 23 nt, synthetic construct
  misc_feature 1..23: note = Description of Artificial Sequence: Synthetic oligonucleotide
  source 1..23: mol_type = other RNA
ttagttggtataacacttggata

SEQ ID NO: 3496 - RNA, 23 nt, synthetic construct
  misc_feature 1..23: note = Description of Artificial Sequence: Synthetic oligonucleotide
  source 1..23: mol_type = other RNA
tagagacaatctttggtgttcta

SEQ ID NO: 3497 - RNA, 23 nt, synthetic construct
  misc_feature 1..23: note = Description of Artificial Sequence: Synthetic oligonucleotide
  source 1..23: mol_type = other RNA
tcagagacaatctttggtgttct

SEQ ID NO: 3498 - RNA, 23 nt, synthetic construct
  misc_feature 1..23: note = Description of Artificial Sequence: Synthetic oligonucleotide
  source 1..23: mol_type = other RNA
atcagataaaaaggacaacatgc

SEQ ID NO: 3499 - RNA, 23 nt, synthetic construct
  misc_feature 1..23: note = Description of Artificial Sequence: Synthetic oligonucleotide
  source 1..23: mol_type = other RNA
atttctaacttcaggagttgatg

SEQ ID NO: 3500 - RNA, 23 nt, synthetic construct
  misc_feature 1..23: note = Description of Artificial Sequence: Synthetic oligonucleotide
  source 1..23: mol_type = other RNA
tggtataacacttggatagttgg

SEQ ID NO: 3501 - RNA, 23 nt, synthetic construct
  misc_feature 1..23: note = Description of Artificial Sequence: Synthetic oligonucleotide
  source 1..23: mol_type = other RNA
agactacacaagattaataccat

SEQ ID NO: 3502 - RNA, 23 nt, synthetic construct
  misc_feature 1..23: note = Description of Artificial Sequence: Synthetic oligonucleotide
  source 1..23: mol_type = other RNA
tgcatgttcagtgaaggagccag

SEQ ID NO: 3503 - RNA, 23 nt, synthetic construct
  misc_feature 1..23: note = Description of Artificial Sequence: Synthetic oligonucleotide
  source 1..23: mol_type = other RNA
tggtaatgtacactactgatata

SEQ ID NO: 3504 - RNA, 23 nt, synthetic construct
  misc_feature 1..23: note = Description of Artificial Sequence: Synthetic oligonucleotide
  source 1..23: mol_type = other RNA
tgtgttctaaggaaaaggctgcc

SEQ ID NO: 3505 - RNA, 23 nt, synthetic construct
  misc_feature 1..23: note = Description of Artificial Sequence: Synthetic oligonucleotide
  source 1..23: mol_type = other RNA
taactatttcacactaaccagtt

SEQ ID NO: 3506 - RNA, 23 nt, synthetic construct
  misc_feature 1..23: note = Description of Artificial Sequence: Synthetic oligonucleotide
  source 1..23: mol_type = other RNA
aatgtacactactgatatagttc

SEQ ID NO: 3507 - RNA, 23 nt, synthetic construct
  misc_feature 1..23: note = Description of Artificial Sequence: Synthetic oligonucleotide
  source 1..23: mol_type = other RNA
ttaatgtacactactgatatagt

SEQ ID NO: 3508 - RNA, 23 nt, synthetic construct
  misc_feature 1..23: note = Description of Artificial Sequence: Synthetic oligonucleotide
  source 1..23: mol_type = other RNA
tagtccatcttaaaatattactg

SEQ ID NO: 3509 - RNA, 23 nt, synthetic construct
  misc_feature 1..23: note = Description of Artificial Sequence: Synthetic oligonucleotide
  source 1..23: mol_type = other RNA
ttttcccagtccatcttaaaata

SEQ ID NO: 3510 - RNA, 23 nt, synthetic construct
  misc_feature 1..23: note = Description of Artificial Sequence: Synthetic oligonucleotide
  source 1..23: mol_type = other RNA
tgactaggcatgttcagtgaagg

SEQ ID NO: 3511 - RNA, 23 nt, synthetic construct
  misc_feature 1..23: note = Description of Artificial Sequence: Synthetic oligonucleotide
  source 1..23: mol_type = other RNA
tataacacttggatagttggttg

SEQ ID NO: 3512 - RNA, 23 nt, synthetic construct
  misc_feature 1..23: note = Description of Artificial Sequence: Synthetic oligonucleotide
  source 1..23: mol_type = other RNA
tttagttggtataacacttggat

SEQ ID NO: 3513 - RNA, 23 nt, synthetic construct
  misc_feature 1..23: note = Description of Artificial Sequence: Synthetic oligonucleotide
  source 1..23: mol_type = other RNA
agtccatcttaaaatattactgc

SEQ ID NO: 3514 - RNA, 23 nt, synthetic construct
  misc_feature 1..23: note = Description of Artificial Sequence: Synthetic oligonucleotide
  source 1..23: mol_type = other RNA
taggatatagctgtggattttac

SEQ ID NO: 3515 - RNA, 23 nt, synthetic construct
  misc_feature 1..23: note = Description of Artificial Sequence: Synthetic oligonucleotide
  source 1..23: mol_type = other RNA
ttaggcatgttcagtgaaggagc

SEQ ID NO: 3516 - RNA, 23 nt, synthetic construct
  misc_feature 1..23: note = Description of Artificial Sequence: Synthetic oligonucleotide
  source 1..23: mol_type = other RNA
ttggactaggcatgttcagtgaa

SEQ ID NO: 3517 - RNA, 23 nt, synthetic construct
  misc_feature 1..23: note = Description of Artificial Sequence: Synthetic oligonucleotide
  source 1..23: mol_type = other RNA
gttttagttggtataacacttgg

SEQ ID NO: 3518 - RNA, 23 nt, synthetic construct
  misc_feature 1..23: note = Description of Artificial Sequence: Synthetic oligonucleotide
  source 1..23: mol_type = other RNA
agacccttaatcatggtggaaac

SEQ ID NO: 3519 - RNA, 23 nt, synthetic construct
  misc_feature 1..23: note = Description of Artificial Sequence: Synthetic oligonucleotide
  source 1..23: mol_type = other RNA
aatgttggactaggcatgttcag

SEQ ID NO: 3520 - RNA, 23 nt, synthetic construct
  misc_feature 1..23: note = Description of Artificial Sequence: Synthetic oligonucleotide
  source 1..23: mol_type = other RNA
atggtaatgtacactactgatat

SEQ ID NO: 3521 - RNA, 23 nt, synthetic construct
  misc_feature 1..23: note = Description of Artificial Sequence: Synthetic oligonucleotide
  source 1..23: mol_type = other RNA
tagttggtataacacttggatag

SEQ ID NO: 3522 - RNA, 23 nt, synthetic construct
  misc_feature 1..23: note = Description of Artificial Sequence: Synthetic oligonucleotide
  source 1..23: mol_type = other RNA
tagttgccatattggacttggaa

SEQ ID NO: 3523 - RNA, 23 nt, synthetic construct
  misc_feature 1..23: note = Description of Artificial Sequence: Synthetic oligonucleotide
  source 1..23: mol_type = other RNA
tgtagcctagacagtgaaatgat

SEQ ID NO: 3524 - RNA, 23 nt, synthetic construct
  misc_feature 1..23: note = Description of Artificial Sequence: Synthetic oligonucleotide
  source 1..23: mol_type = other RNA
agcatcaggatatagctgtggat

SEQ ID NO: 3525 - RNA, 23 nt, synthetic construct
  misc_feature 1..23: note = Description of Artificial Sequence: Synthetic oligonucleotide
  source 1..23: mol_type = other RNA
tactaggcatgttcagtgaagga

SEQ ID NO: 3526 - RNA, 23 nt, synthetic construct
  misc_feature 1..23: note = Description of Artificial Sequence: Synthetic oligonucleotide
  source 1..23: mol_type = other RNA
ttcataagcactctcaaccacct

SEQ ID NO: 3527 - RNA, 23 nt, synthetic construct
  misc_feature 1..23: note = Description of Artificial Sequence: Synthetic oligonucleotide
  source 1..23: mol_type = other RNA
tgtaatgtacactactgatatag

SEQ ID NO: 3528 - RNA, 23 nt, synthetic construct
  misc_feature 1..23: note = Description of Artificial Sequence: Synthetic oligonucleotide
  source 1..23: mol_type = other RNA
taacacttggatagttggttgca

SEQ ID NO: 3529 - RNA, 23 nt, synthetic construct
  misc_feature 1..23: note = Description of Artificial Sequence: Synthetic oligonucleotide
  source 1..23: mol_type = other RNA
tatactctctgccaaatctgcta

SEQ ID NO: 3530 - RNA, 23 nt, synthetic construct
  misc_feature 1..23: note = Description of Artificial Sequence: Synthetic oligonucleotide
  source 1..23: mol_type = other RNA
taggcatgttcagtgaaggagcc

SEQ ID NO: 3531 - RNA, 23 nt, synthetic construct
  misc_feature 1..23: note = Description of Artificial Sequence: Synthetic oligonucleotide
  source 1..23: mol_type = other RNA
aaaaatgttggactaggcatgtt

SEQ ID NO: 3532 - RNA, 23 nt, synthetic construct
  misc_feature 1..23: note = Description of Artificial Sequence: Synthetic oligonucleotide
  source 1..23: mol_type = other RNA
ttcattaagatactgatggcaca

SEQ ID NO: 3533 - RNA, 23 nt, synthetic construct
  misc_feature 1..23: note = Description of Artificial Sequence: Synthetic oligonucleotide
  source 1..23: mol_type = other RNA
tttcattaagatactgatggcac

SEQ ID NO: 3534 - RNA, 23 nt, synthetic construct
  misc_feature 1..23: note = Description of Artificial Sequence: Synthetic oligonucleotide
  source 1..23: mol_type = other RNA
agacaatctttggtgttctaagg

SEQ ID NO: 3535 - RNA, 23 nt, synthetic construct
  misc_feature 1..23: note = Description of Artificial Sequence: Synthetic oligonucleotide
  source 1..23: mol_type = other RNA
tagcctagacagtgaaatgatat

SEQ ID NO: 3536 - RNA, 23 nt, synthetic construct
  misc_feature 1..23: note = Description of Artificial Sequence: Synthetic oligonucleotide
  source 1..23: mol_type = other RNA
ttgttgtagcctagacagtgaaa

SEQ ID NO: 3537 - RNA, 23 nt, synthetic construct
  misc_feature 1..23: note = Description of Artificial Sequence: Synthetic oligonucleotide
  source 1..23: mol_type = other RNA
tgtataacacttggatagttggt

SEQ ID NO: 3538 - RNA, 23 nt, synthetic construct
  misc_feature 1..23: note = Description of Artificial Sequence: Synthetic oligonucleotide
  source 1..23: mol_type = other RNA
tcatattggacttggaaccaaaa

SEQ ID NO: 3539 - RNA, 23 nt, synthetic construct
  misc_feature 1..23: note = Description of Artificial Sequence: Synthetic oligonucleotide
  source 1..23: mol_type = other RNA
agtttgatcacctcataagcact

SEQ ID NO: 3540 - RNA, 23 nt, synthetic construct
  misc_feature 1..23: note = Description of Artificial Sequence: Synthetic oligonucleotide
  source 1..23: mol_type = other RNA
tcaccttcacaaggtctgagatt

SEQ ID NO: 3541 - RNA, 23 nt, synthetic construct
  misc_feature 1..23: note = Description of Artificial Sequence: Synthetic oligonucleotide
  source 1..23: mol_type = other RNA
aggatatagctgtggattttaca

SEQ ID NO: 3542 - RNA, 23 nt, synthetic construct
  misc_feature 1..23: note = Description of Artificial Sequence: Synthetic oligonucleotide
  source 1..23: mol_type = other RNA
actaggcatgttcagtgaaggag

SEQ ID NO: 3543 - RNA, 23 nt, synthetic construct
  misc_feature 1..23: note = Description of Artificial Sequence: Synthetic oligonucleotide
  source 1..23: mol_type = other RNA
tggatttatacactggatcccag

SEQ ID NO: 3544 - RNA, 23 nt, synthetic construct
  misc_feature 1..23: note = Description of Artificial Sequence: Synthetic oligonucleotide
  source 1..23: mol_type = other RNA
ttcactgttcaaggtttattggg

SEQ ID NO: 3545 - RNA, 23 nt, synthetic construct
  misc_feature 1..23: note = Description of Artificial Sequence: Synthetic oligonucleotide
  source 1..23: mol_type = other RNA
aagatactgatggcacaggccat

SEQ ID NO: 3546 - RNA, 23 nt, synthetic construct
  misc_feature 1..23: note = Description of Artificial Sequence: Synthetic oligonucleotide
  source 1..23: mol_type = other RNA
tgtcttcgatgacatcaacaaga

SEQ ID NO: 3547 - RNA, 23 nt, synthetic construct
  misc_feature 1..23: note = Description of Artificial Sequence: Synthetic oligonucleotide
  source 1..23: mol_type = other RNA
attatactctctgccaaatctgc

SEQ ID NO: 3548 - RNA, 23 nt, synthetic construct
  misc_feature 1..23: note = Description of Artificial Sequence: Synthetic oligonucleotide
  source 1..23: mol_type = other RNA
tacccttaatcatggtggaaact

SEQ ID NO: 3549 - RNA, 23 nt, synthetic construct
  misc_feature 1..23: note = Description of Artificial Sequence: Synthetic oligonucleotide
  source 1..23: mol_type = other RNA
tagaatcctgttgtagcctagac

SEQ ID NO: 3550 - RNA, 23 nt, synthetic construct
  misc_feature 1..23: note = Description of Artificial Sequence: Synthetic oligonucleotide
  source 1..23: mol_type = other RNA
tgacaacatgcacaacctccacc

SEQ ID NO: 3551 - RNA, 23 nt, synthetic construct
  misc_feature 1..23: note = Description of Artificial Sequence: Synthetic oligonucleotide
  source 1..23: mol_type = other RNA
aggcatgttcagtgaaggagcca

SEQ ID NO: 3552 - RNA, 23 nt, synthetic construct
  misc_feature 1..23: note = Description of Artificial Sequence: Synthetic oligonucleotide
  source 1..23: mol_type = other RNA
tattggacttggaaccaaaagga

SEQ ID NO: 3553 - RNA, 23 nt, synthetic construct
  misc_feature 1..23: note = Description of Artificial Sequence: Synthetic oligonucleotide
  source 1..23: mol_type = other RNA
taagatactgatggcacaggcca

SEQ ID NO: 3554 - RNA, 23 nt, synthetic construct
  misc_feature 1..23: note = Description of Artificial Sequence: Synthetic oligonucleotide
  source 1..23: mol_type = other RNA
tagtttgatcacctcataagcac

SEQ ID NO: 3555 - RNA, 23 nt, synthetic construct
  misc_feature 1..23: note = Description of Artificial Sequence: Synthetic oligonucleotide
  source 1..23: mol_type = other RNA
tgagtttgatcacctcataagca

SEQ ID NO: 3556 - RNA, 23 nt, synthetic construct
  misc_feature 1..23: note = Description of Artificial Sequence: Synthetic oligonucleotide
  source 1..23: mol_type = other RNA
attctgtcccaaaatgcaaggaa

SEQ ID NO: 3557 - RNA, 23 nt, synthetic construct
  misc_feature 1..23: note = Description of Artificial Sequence: Synthetic oligonucleotide
  source 1..23: mol_type = other RNA
tgccatattggacttggaaccaa

SEQ ID NO: 3558 - RNA, 23 nt, synthetic construct
  misc_feature 1..23: note = Description of Artificial Sequence: Synthetic oligonucleotide
  source 1..23: mol_type = other RNA
tctgttgtagcctagacagtgaa

SEQ ID NO: 3559 - RNA, 23 nt, synthetic construct
  misc_feature 1..23: note = Description of Artificial Sequence: Synthetic oligonucleotide
  source 1..23: mol_type = other RNA
tcctgttgtagcctagacagtga

SEQ ID NO: 3560 - RNA, 23 nt, synthetic construct
  misc_feature 1..23: note = Description of Artificial Sequence: Synthetic oligonucleotide
  source 1..23: mol_type = other RNA
tccaacaactgtaatcttattct

SEQ ID NO: 3561 - RNA, 23 nt, synthetic construct
  misc_feature 1..23: note = Description of Artificial Sequence: Synthetic oligonucleotide
  source 1..23: mol_type = other RNA
tacctcataagcactctcaacca

SEQ ID NO: 3562 - RNA, 23 nt, synthetic construct
  misc_feature 1..23: note = Description of Artificial Sequence: Synthetic oligonucleotide
  source 1..23: mol_type = other RNA
taatcctgttgtagcctagacag

SEQ ID NO: 3563 - RNA, 23 nt, synthetic construct
  misc_feature 1..23: note = Description of Artificial Sequence: Synthetic oligonucleotide
  source 1..23: mol_type = other RNA
agaatcctgttgtagcctagaca

SEQ ID NO: 3564 - RNA, 23 nt, synthetic construct
  misc_feature 1..23: note = Description of Artificial Sequence: Synthetic oligonucleotide
  source 1..23: mol_type = other RNA
tacaacatgcacaacctccacct

SEQ ID NO: 3565 - RNA, 23 nt, synthetic construct
  misc_feature 1..23: note = Description of Artificial Sequence: Synthetic oligonucleotide
  source 1..23: mol_type = other RNA
tctttgagtttgatcacctcata

SEQ ID NO: 3566 - RNA, 23 nt, synthetic construct
  misc_feature 1..23: note = Description of Artificial Sequence: Synthetic oligonucleotide
  source 1..23: mol_type = other RNA
ttagcctttgagtttgatcacct

SEQ ID NO: 3567 - RNA, 23 nt, synthetic construct
  misc_feature 1..23: note = Description of Artificial Sequence: Synthetic oligonucleotide
  source 1..23: mol_type = other RNA
ttcaaacgggcctcttcctcaga

SEQ ID NO: 3568 - RNA, 23 nt, synthetic construct
  misc_feature 1..23: note = Description of Artificial Sequence: Synthetic oligonucleotide
  source 1..23: mol_type = other RNA
tactctcaaccacctgcttgtga

SEQ ID NO: 3569 - RNA, 23 nt, synthetic construct
  misc_feature 1..23: note = Description of Artificial Sequence: Synthetic oligonucleotide
  source 1..23: mol_type = other RNA
ttatactctctgccaaatctgct

SEQ ID NO: 3570 - RNA, 23 nt, synthetic construct
  misc_feature 1..23: note = Description of Artificial Sequence: Synthetic oligonucleotide
  source 1..23: mol_type = other RNA
gtttgatcacctcataagcactc

SEQ ID NO: 3571 - RNA, 23 nt, synthetic construct
  misc_feature 1..23: note = Description of Artificial Sequence: Synthetic oligonucleotide
  source 1..23: mol_type = other RNA
atactctctgccaaatctgctac

SEQ ID NO: 3572 - RNA, 23 nt, synthetic construct
  misc_feature 1..23: note = Description of Artificial Sequence: Synthetic oligonucleotide
  source 1..23: mol_type = other RNA
tcattatactctctgccaaatct

SEQ ID NO: 3573 - RNA, 23 nt, synthetic construct
  misc_feature 1..23: note = Description of Artificial Sequence: Synthetic oligonucleotide
  source 1..23: mol_type = other RNA
ttcattatactctctgccaaatc

SEQ ID NO: 3574 - RNA, 23 nt, synthetic construct
  misc_feature 1..23: note = Description of Artificial Sequence: Synthetic oligonucleotide
  source 1..23: mol_type = other RNA
tattctgtcccaaaatgcaagga

SEQ ID NO: 3575 - RNA, 23 nt, synthetic construct
  misc_feature 1..23: note = Description of Artificial Sequence: Synthetic oligonucleotide
  source 1..23: mol_type = other RNA
tcacaaggtctgagattccattc

SEQ ID NO: 3576 - RNA, 23 nt, synthetic construct
  misc_feature 1..23: note = Description of Artificial Sequence: Synthetic oligonucleotide
  source 1..23: mol_type = other RNA
tagcatcaggatatagctgtgga

SEQ ID NO: 3577 - RNA, 23 nt, synthetic construct
  misc_feature 1..23: note = Description of Artificial Sequence: Synthetic oligonucleotide
  source 1..23: mol_type = other RNA
tttcaaacgggcctcttcctcag

SEQ ID NO: 3578 - RNA, 23 nt, synthetic construct
  misc_feature 1..23: note = Description of Artificial Sequence: Synthetic oligonucleotide
  source 1..23: mol_type = other RNA
taaacgggcctcttcctcagaag

SEQ ID NO: 3579 - RNA, 23 nt, synthetic construct
  misc_feature 1..23: note = Description of Artificial Sequence: Synthetic oligonucleotide
  source 1..23: mol_type = other RNA
tacactggatcccaggatgtgac

SEQ ID NO: 3580 - RNA, 23 nt, synthetic construct
  misc_feature 1..23: note = Description of Artificial Sequence: Synthetic oligonucleotide
  source 1..23: mol_type = other RNA
tggtgttctaaggaaaaggctgc

SEQ ID NO: 3581 - RNA, 23 nt, synthetic construct
  misc_feature 1..23: note = Description of Artificial Sequence: Synthetic oligonucleotide
  source 1..23: mol_type = other RNA
tatttcacactaaccagttgaag

SEQ ID NO: 3582 - RNA, 21 nt, synthetic construct
  misc_feature 1..21: note = Description of Artificial Sequence: Synthetic oligonucleotide
  source 1..21: mol_type = other RNA
  modified_base 1: mod_base = OTHER; note = 2'-O-methyluridine-3'-phosphorothioate
  modified_base 2: mod_base = OTHER; note = 2'-O-methyluridine-3'-phosphorothioate
  modified_base 3: mod_base = OTHER; note = 2'-O-methyluridine-3'-phosphate
  modified_base 4: mod_base = OTHER; note = 2'-O-methyladenosine-3'-phosphate
  modified_base 5: mod_base = OTHER; note = 2'-O-methyluridine-3'-phosphate
  modified_base 6: mod_base = OTHER; note = 2'-O-methylcytidine-3'-phosphate
  modified_base 7: mod_base = OTHER; note = 2'-fluorouridine-3'-phosphate
  modified_base 8: mod_base = OTHER; note = 2'-O-methylguanosine-3'-phosphate
  modified_base 9: mod_base = OTHER; note = 2'-fluoroadenosine-3'-phosphate
  modified_base 10: mod_base = OTHER; note = 2'-fluorouridine-3'-phosphate
  modified_base 11: mod_base = OTHER; note = 2'-fluorocytidine-3'-phosphate
  modified_base 12: mod_base = OTHER; note = 2'-O-methyluridine-3'-phosphate
  modified_base 13: mod_base = OTHER; note = 2'-O-methylguanosine-3'-phosphate
  modified_base 14: mod_base = OTHER; note = 2'-O-methyluridine-3'-phosphate
  modified_base 15: mod_base = OTHER; note = 2'-O-methylguanosine-3'-phosphate
  modified_base 16: mod_base = OTHER; note = 2'-O-methyladenosine-3'-phosphate
  modified_base 17: mod_base = OTHER; note = 2'-O-methyluridine-3'-phosphate
  modified_base 18: mod_base = OTHER; note = 2'-O-methyluridine-3'-phosphate
  modified_base 19: mod_base = OTHER; note = 2'-O-methyladenosine-3'-phosphate
  modified_base 20: mod_base = OTHER; note = 2'-O-methyladenosine-3'-phosphate
  modified_base 21: mod_base = OTHER; note = 2'-O-methyladenosine-3'-phosphate attached to N-[tris(N-acetylgalactosamine-alkyl)-amidodecanoyl)]-4-hydr oxyprolinol Hyp-(N-acetylgalactosamine-alkyl)3
tttatctgatctgtgattaaa

SEQ ID NO: 3583 - RNA, 21 nt, synthetic construct
  misc_feature 1..21: note = Description of Artificial Sequence: Synthetic oligonucleotide
  source 1..21: mol_type = other RNA
  modified_base 1: mod_base = OTHER; note = 2'-O-methyladenosine-3'- phosphorothioate
  modified_base 2: mod_base = OTHER; note = 2'-O-methylcytidine-3'- phosphorothioate
  modified_base 3: mod_base = OTHER; note = 2'-O-methyluridine-3'-phosphate
  modified_base 4: mod_base = OTHER; note = 2'-O-methylguanosine-3'-phosphate
  modified_base 5: mod_base = OTHER; note = 2'-O-methylguanosine-3'-phosphate
  modified_base 6: mod_base = OTHER; note = 2'-O-methyluridine-3'-phosphate
  modified_base 7: mod_base = OTHER; note = 2'-fluorouridine-3'-phosphate
  modified_base 8: mod_base = OTHER; note = 2'-O-methyladenosine-3'-phosphate
  modified_base 9: mod_base = OTHER; note = 2'-fluoroguanosine-3'-phosphate
  modified_base 10: mod_base = OTHER; note = 2'-fluorouridine-3'-phosphate
  modified_base 11: mod_base = OTHER; note = 2'-fluoroguanosine-3'-phosphate
  modified_base 12: mod_base = OTHER; note = 2'-O-methyluridine-3'-phosphate
  modified_base 13: mod_base = OTHER; note = 2'-O-methylguanosine-3'-phosphate
  modified_base 14: mod_base = OTHER; note = 2'-O-methyladenosine-3'-phosphate
  modified_base 15: mod_base = OTHER; note = 2'-O-methyladenosine-3'-phosphate
  modified_base 16: mod_base = OTHER; note = 2'-O-methyladenosine-3'-phosphate
  modified_base 17: mod_base = OTHER; note = 2'-O-methyluridine-3'-phosphate
  modified_base 18: mod_base = OTHER; note = 2'-O-methyladenosine-3'-phosphate
  modified_base 19: mod_base = OTHER; note = 2'-O-methylguanosine-3'-phosphate
  modified_base 20: mod_base = OTHER; note = 2'-O-methyluridine-3'-phosphate
  modified_base 21: mod_base = OTHER; note = 2'-O-methyluridine-3'-phosphate attached to N-[tris(N-acetylgalactosamine-alkyl)-amidodecanoyl)]-4-hydr oxyprolinol Hyp-(N-acetylgalactosamine-alkyl)3
actggttagtgtgaaatagtt

SEQ ID NO: 3584 - RNA, 21 nt, synthetic construct
  misc_feature 1..21: note = Description of Artificial Sequence: Synthetic oligonucleotide
  source 1..21: mol_type = other RNA
  modified_base 1: mod_base = OTHER; note = 2'-O-methyladenosine-3'- phosphorothioate
  modified_base 2: mod_base = OTHER; note = 2'-O-methyladenosine-3'- phosphorothioate
  modified_base 3: mod_base = OTHER; note = 2'-O-methylcytidine-3'-phosphate
  modified_base 4: mod_base = OTHER; note = 2'-O-methyladenosine-3'-phosphate
  modified_base 5: mod_base = OTHER; note = 2'-O-methyluridine-3'-phosphate
  modified_base 6: mod_base = OTHER; note = 2'-O-methylguanosine-3'-phosphate
  modified_base 7: mod_base = OTHER; note = 2'-fluorocytidine-3'-phosphate
  modified_base 8: mod_base = OTHER; note = 2'-O-methylcytidine-3'-phosphate
  modified_base 9: mod_base = OTHER; note = 2'-fluorouridine-3'-phosphate
  modified_base 10: mod_base = OTHER; note = 2'-fluoroadenosine-3'-phosphate
  modified_base 11: mod_base = OTHER; note = 2'-fluoroguanosine-3'-phosphate
  modified_base 12: mod_base = OTHER; note = 2'-O-methyluridine-3'-phosphate
  modified_base 13: mod_base = OTHER; note = 2'-O-methylcytidine-3'-phosphate
  modified_base 14: mod_base = OTHER; note = 2'-O-methylcytidine-3'-phosphate
  modified_base 15: mod_base = OTHER; note = 2'-O-methyladenosine-3'-phosphate
  modified_base 16: mod_base = OTHER; note = 2'-O-methyladenosine-3'-phosphate
  modified_base 17: mod_base = OTHER; note = 2'-O-methylcytidine-3'-phosphate
  modified_base 18: mod_base = OTHER; note = 2'-O-methyladenosine-3'-phosphate
  modified_base 19: mod_base = OTHER; note = 2'-O-methyluridine-3'-phosphate
  modified_base 20: mod_base = OTHER; note = 2'-O-methyluridine-3'-phosphate
  modified_base 21: mod_base = OTHER; note = 2'-O-methyluridine-3'-phosphate attached to N-[tris(N-acetylgalactosamine-alkyl)-amidodecanoyl)]-4-hydr oxyprolinol Hyp-(N-acetylgalactosamine-alkyl)3
aacatgcctagtccaacattt

SEQ ID NO: 3585 - RNA, 21 nt, synthetic construct
  misc_feature 1..21: note = Description of Artificial Sequence: Synthetic oligonucleotide
  source 1..21: mol_type = other RNA
  modified_base 1: mod_base = OTHER; note = 2'-O-methylcytidine-3'- phosphorothioate
  modified_base 2: mod_base = OTHER; note = 2'-O-methyladenosine-3'- phosphorothioate
  modified_base 3: mod_base = OTHER; note = 2'-O-methyladenosine-3'-phosphate
  modified_base 4: mod_base = OTHER; note = 2'-O-methylguanosine-3'-phosphate
  modified_base 5: mod_base = OTHER; note = 2'-O-methyluridine-3'-phosphate
  modified_base 6: mod_base = OTHER; note = 2'-O-methylcytidine-3'-phosphate
  modified_base 7: mod_base = OTHER; note = 2'-fluorocytidine-3'-phosphate
  modified_base 8: mod_base = OTHER; note = 2'-O-methyladenosine-3'-phosphate
  modified_base 9: mod_base = OTHER; note = 2'-fluoroadenosine-3'-phosphate
  modified_base 10: mod_base = OTHER; note = 2'-fluorouridine-3'-phosphate
  modified_base 11: mod_base = OTHER; note = 2'-fluoroadenosine-3'-phosphate
  modified_base 12: mod_base = OTHER; note = 2'-O-methyluridine-3'-phosphate
  modified_base 13: mod_base = OTHER; note = 2'-O-methylguanosine-3'-phosphate
  modified_base 14: mod_base = OTHER; note = 2'-O-methylguanosine-3'-phosphate
  modified_base 15: mod_base = OTHER; note = 2'-O-methylcytidine-3'-phosphate
  modified_base 16: mod_base = OTHER; note = 2'-O-methyladenosine-3'-phosphate
  modified_base 17: mod_base = OTHER; note = 2'-O-methyladenosine-3'-phosphate
  modified_base 18: mod_base = OTHER; note = 2'-O-methylcytidine-3'-phosphate
  modified_base 19: mod_base = OTHER; note = 2'-O-methyluridine-3'-phosphate
  modified_base 20: mod_base = OTHER; note = 2'-O-methylcytidine-3'-phosphate
  modified_base 21: mod_base = OTHER; note = 2'-O-methyluridine-3'-phosphate attached to N-[tris(N-acetylgalactosamine-alkyl)-amidodecanoyl)]-4-hydr oxyprolinol Hyp-(N-acetylgalactosamine-alkyl)3
caagtccaatatggcaactct

SEQ ID NO: 3586 - RNA, 21 nt, synthetic construct
  misc_feature 1..21: note = Description of Artificial Sequence: Synthetic oligonucleotide
  source 1..21: mol_type = other RNA
  modified_base 1: mod_base = OTHER; note = 2'-O-methyluridine-3'-phosphorothioate
  modified_base 2: mod_base = OTHER; note = 2'-O-methylcytidine-3'- phosphorothioate
  modified_base 3: mod_base = OTHER; note = 2'-O-methylcytidine-3'-phosphate
  modified_base 4: mod_base = OTHER; note = 2'-O-methyladenosine-3'-phosphate
  modified_base 5: mod_base = OTHER; note = 2'-O-methylcytidine-3'-phosphate
  modified_base 6: mod_base = OTHER; note = 2'-O-methylcytidine-3'-phosphate
  modified_base 7: mod_base = OTHER; note = 2'-fluoroadenosine-3'-phosphate
  modified_base 8: mod_base = OTHER; note = 2'-O-methyluridine-3'-phosphate
  modified_base 9: mod_base = OTHER; note = 2'-fluoroguanosine-3'-phosphate
  modified_base 10: mod_base = OTHER; note = 2'-fluoroadenosine-3'-phosphate
  modified_base 11: mod_base = OTHER; note = 2'-fluorouridine-3'-phosphate
  modified_base 12: mod_base = OTHER; note = 2'-O-methyluridine-3'-phosphate
  modified_base 13: mod_base = OTHER; note = 2'-O-methyladenosine-3'-phosphate
  modified_base 14: mod_base = OTHER; note = 2'-O-methyladenosine-3'-phosphate
  modified_base 15: mod_base = OTHER; note = 2'-O-methylguanosine-3'-phosphate
  modified_base 16: mod_base = OTHER; note = 2'-O-methylguanosine-3'-phosphate
  modified_base 17: mod_base = OTHER; note = 2'-O-methylguanosine-3'-phosphate
  modified_base 18: mod_base = OTHER; note = 2'-O-methyluridine-3'-phosphate
  modified_base 19: mod_base = OTHER; note = 2'-O-methylcytidine-3'-phosphate
  modified_base 20: mod_base = OTHER; note = 2'-O-methyluridine-3'-phosphate
  modified_base 21: mod_base = OTHER; note = 2'-O-methyluridine-3'-phosphate attached to N-[tris(N-acetylgalactosamine-alkyl)-amidodecanoyl)]-4-hydr oxyprolinol Hyp-(N-acetylgalactosamine-alkyl)3
tccaccatgattaagggtctt

SEQ ID NO: 3587 - RNA, 21 nt, synthetic construct
  misc_feature 1..21: note = Description of Artificial Sequence: Synthetic oligonucleotide
  source 1..21: mol_type = other RNA
  modified_base 1: mod_base = OTHER; note = 2'-O-methyluridine-3'-phosphorothioate
  modified_base 2: mod_base = OTHER; note = 2'-O-methylcytidine-3'- phosphorothioate
  modified_base 3: mod_base = OTHER; note = 2'-O-methyladenosine-3'-phosphate
  modified_base 4: mod_base = OTHER; note = 2'-O-methyluridine-3'-phosphate
  modified_base 5: mod_base = OTHER; note = 2'-O-methyluridine-3'-phosphate
  modified_base 6: mod_base = OTHER; note = 2'-O-methyluridine-3'-phosphate
  modified_base 7: mod_base = OTHER; note = 2'-fluorocytidine-3'-phosphate
  modified_base 8: mod_base = OTHER; note = 2'-O-methyladenosine-3'-phosphate
  modified_base 9: mod_base = OTHER; note = 2'-fluorocytidine-3'-phosphate
  modified_base 10: mod_base = OTHER; note = 2'-fluorouridine-3'-phosphate
  modified_base 11: mod_base = OTHER; note = 2'-fluoroguanosine-3'-phosphate
  modified_base 12: mod_base = OTHER; note = 2'-O-methyluridine-3'-phosphate
  modified_base 13: mod_base = OTHER; note = 2'-O-methylcytidine-3'-phosphate
  modified_base 14: mod_base = OTHER; note = 2'-O-methyluridine-3'-phosphate
  modified_base 15: mod_base = OTHER; note = 2'-O-methyladenosine-3'-phosphate
  modified_base 16: mod_base = OTHER; note = 2'-O-methylguanosine-3'-phosphate
  modified_base 17: mod_base = OTHER; note = 2'-O-methylguanosine-3'-phosphate
  modified_base 18: mod_base = OTHER; note = 2'-O-methylcytidine-3'-phosphate
  modified_base 19: mod_base = OTHER; note = 2'-O-methyluridine-3'-phosphate
  modified_base 20: mod_base = OTHER; note = 2'-O-methyladenosine-3'-phosphate
  modified_base 21: mod_base = OTHER; note = 2'-O-methyladenosine-3'-phosphate attached to N-[tris(N-acetylgalactosamine-alkyl)-amidodecanoyl)]-4-hydr oxyprolinol Hyp-(N-acetylgalactosamine-alkyl)3
tcatttcactgtctaggctaa

SEQ ID NO: 3588 - RNA, 21 nt, synthetic construct
  misc_feature 1..21: note = Description of Artificial Sequence: Synthetic oligonucleotide
  source 1..21: mol_type = other RNA
  modified_base 1: mod_base = OTHER; note = 2'-O-methyluridine-3'-phosphorothioate
  modified_base 2: mod_base = OTHER; note = 2'-O-methylguanosine-3'- phosphorothioate
  modified_base 3: mod_base = OTHER; note = 2'-O-methyluridine-3'-phosphate
  modified_base 4: mod_base = OTHER; note = 2'-O-methylcytidine-3'-phosphate
  modified_base 5: mod_base = OTHER; note = 2'-O-methylcytidine-3'-phosphate
  modified_base 6: mod_base = OTHER; note = 2'-O-methyluridine-3'-phosphate
  modified_base 7: mod_base = OTHER; note = 2'-fluorouridine-3'-phosphate
  modified_base 8: mod_base = OTHER; note = 2'-O-methyluridine-3'-phosphate
  modified_base 9: mod_base = OTHER; note = 2'-fluorouridine-3'-phosphate
  modified_base 10: mod_base = OTHER; note = 2'-fluorouridine-3'-phosphate
  modified_base 11: mod_base = OTHER; note = 2'-fluoroadenosine-3'-phosphate
  modified_base 12: mod_base = OTHER; note = 2'-O-methyluridine-3'-phosphate
  modified_base 13: mod_base = OTHER; note = 2'-O-methylcytidine-3'-phosphate
  modified_base 14: mod_base = OTHER; note = 2'-O-methyluridine-3'-phosphate
  modified_base 15: mod_base = OTHER; note = 2'-O-methylguanosine-3'-phosphate
  modified_base 16: mod_base = OTHER; note = 2'-O-methyladenosine-3'-phosphate
  modified_base 17: mod_base = OTHER; note = 2'-O-methyluridine-3'-phosphate
  modified_base 18: mod_base = OTHER; note = 2'-O-methylcytidine-3'-phosphate
  modified_base 19: mod_base = OTHER; note = 2'-O-methyluridine-3'-phosphate
  modified_base 20: mod_base = OTHER; note = 2'-O-methylguanosine-3'-phosphate
  modified_base 21: mod_base = OTHER; note = 2'-O-methyluridine-3'-phosphate attached to N-[tris(N-acetylgalactosamine-alkyl)-amidodecanoyl)]-4-hydr oxyprolinol Hyp-(N-acetylgalactosamine-alkyl)3
tgtcctttttatctgatctgt

SEQ ID NO: 3589 - RNA, 21 nt, synthetic construct
  misc_feature 1..21: note = Description of Artificial Sequence: Synthetic oligonucleotide
  source 1..21: mol_type = other RNA
  modified_base 1: mod_base = OTHER; note = 2'-O-methylcytidine-3'- phosphorothioate
  modified_base 2: mod_base = OTHER; note = 2'-O-methylcytidine-3'- phosphorothioate
  modified_base 3: mod_base = OTHER; note = 2'-O-methyladenosine-3'-phosphate
  modified_base 4: mod_base = OTHER; note = 2'-O-methylguanosine-3'-phosphate
  modified_base 5: mod_base = OTHER; note = 2'-O-methyluridine-3'-phosphate
  modified_base 6: mod_base = OTHER; note = 2'-O-methylguanosine-3'-phosphate
  modified_base 7: mod_base = OTHER; note = 2'-fluorouridine-3'-phosphate
  modified_base 8: mod_base = OTHER; note = 2'-O-methyladenosine-3'-phosphate
  modified_base 9: mod_base = OTHER; note = 2'-fluorouridine-3'-phosphate
  modified_base 10: mod_base = OTHER; note = 2'-fluoroadenosine-3'-phosphate
  modified_base 11: mod_base = OTHER; note = 2'-fluoroadenosine-3'-phosphate
  modified_base 12: mod_base = OTHER; note = 2'-O-methyladenosine-3'-phosphate
  modified_base 13: mod_base = OTHER; note = 2'-O-methyluridine-3'-phosphate
  modified_base 14: mod_base = OTHER; note = 2'-O-methylcytidine-3'-phosphate
  modified_base 15: mod_base = OTHER; note = 2'-O-methylcytidine-3'-phosphate
  modified_base 16: mod_base = OTHER; note = 2'-O-methyladenosine-3'-phosphate
  modified_base 17: mod_base = OTHER; note = 2'-O-methyladenosine-3'-phosphate
  modified_base 18: mod_base = OTHER; note = 2'-O-methyluridine-3'-phosphate
  modified_base 19: mod_base = OTHER; note = 2'-O-methyladenosine-3'-phosphate
  modified_base 20: mod_base = OTHER; note = 2'-O-methyluridine-3'-phosphate
  modified_base 21: mod_base = OTHER; note = 2'-O-methyladenosine-3'-phosphate attached to N-[tris(N-acetylgalactosamine-alkyl)-amidodecanoyl)]-4-hydr oxyprolinol Hyp-(N-acetylgalactosamine-alkyl)3
ccagtgtataaatccaatata

SEQ ID NO: 3590 - RNA, 21 nt, synthetic construct
  misc_feature 1..21: note = Description of Artificial Sequence: Synthetic oligonucleotide
  source 1..21: mol_type = other RNA
  modified_base 1: mod_base = OTHER; note = 2'-O-methyluridine-3'-phosphorothioate
  modified_base 2: mod_base = OTHER; note = 2'-O-methylcytidine-3'- phosphorothioate
  modified_base 3: mod_base = OTHER; note = 2'-O-methylcytidine-3'-phosphate
  modified_base 4: mod_base = OTHER; note = 2'-O-methyladenosine-3'-phosphate
  modified_base 5: mod_base = OTHER; note = 2'-O-methyladenosine-3'-phosphate
  modified_base 6: mod_base = OTHER; note = 2'-O-methylguanosine-3'-phosphate
  modified_base 7: mod_base = OTHER; note = 2'-fluorouridine-3'-phosphate
  modified_base 8: mod_base = OTHER; note = 2'-O-methylguanosine-3'-phosphate
  modified_base 9: mod_base = OTHER; note = 2'-fluorouridine-3'-phosphate
  modified_base 10: mod_base = OTHER; note = 2'-fluorouridine-3'-phosphate
  modified_base 11: mod_base = OTHER; note = 2'-fluoroadenosine-3'-phosphate
  modified_base 12: mod_base = OTHER; note = 2'-O-methyluridine-3'-phosphate
  modified_base 13: mod_base = OTHER; note = 2'-O-methyladenosine-3'-phosphate
  modified_base 14: mod_base = OTHER; note = 2'-O-methylcytidine-3'-phosphate
  modified_base 15: mod_base = OTHER; note = 2'-O-methylcytidine-3'-phosphate
  modified_base 16: mod_base = OTHER; note = 2'-O-methyladenosine-3'-phosphate
  modified_base 17: mod_base = OTHER; note = 2'-O-methyladenosine-3'-phosphate
  modified_base 18: mod_base = OTHER; note = 2'-O-methylcytidine-3'-phosphate
  modified_base 19: mod_base = OTHER; note = 2'-O-methyluridine-3'-phosphate
  modified_base 20: mod_base = OTHER; note = 2'-O-methyladenosine-3'-phosphate
  modified_base 21: mod_base = OTHER; note = 2'-O-methyladenosine-3'-phosphate attached to N-[tris(N-acetylgalactosamine-alkyl)-amidodecanoyl)]-4-hydr oxyprolinol Hyp-(N-acetylgalactosamine-alkyl)3
tccaagtgttataccaactaa

SEQ ID NO: 3591 - RNA, 21 nt, synthetic construct
  misc_feature 1..21: note = Description of Artificial Sequence: Synthetic oligonucleotide
  source 1..21: mol_type = other RNA
  modified_base 1: mod_base = OTHER; note = 2'-O-methylguanosine-3'- phosphorothioate
  modified_base 2: mod_base = OTHER; note = 2'-O-methyluridine-3'-phosphorothioate
  modified_base 3: mod_base = OTHER; note = 2'-O-methylcytidine-3'-phosphate
  modified_base 4: mod_base = OTHER; note = 2'-O-methyladenosine-3'-phosphate
  modified_base 5: mod_base = OTHER; note = 2'-O-methyluridine-3'-phosphate
  modified_base 6: mod_base = OTHER; note = 2'-O-methylcytidine-3'-phosphate
  modified_base 7: mod_base = OTHER; note = 2'-fluoroguanosine-3'-phosphate
  modified_base 8: mod_base = OTHER; note = 2'-O-methyladenosine-3'-phosphate
  modified_base 9: mod_base = OTHER; note = 2'-fluoroadenosine-3'-phosphate
  modified_base 10: mod_base = OTHER; note = 2'-fluoroguanosine-3'-phosphate
  modified_base 11: mod_base = OTHER; note = 2'-fluoroadenosine-3'-phosphate
  modified_base 12: mod_base = OTHER; note = 2'-O-methylcytidine-3'-phosphate
  modified_base 13: mod_base = OTHER; note = 2'-O-methyladenosine-3'-phosphate
  modified_base 14: mod_base = OTHER; note = 2'-O-methyladenosine-3'-phosphate
  modified_base 15: mod_base = OTHER; note = 2'-O-methyladenosine-3'-phosphate
  modified_base 16: mod_base = OTHER; note = 2'-O-methyluridine-3'-phosphate
  modified_base 17: mod_base = OTHER; note = 2'-O-methyluridine-3'-phosphate
  modified_base 18: mod_base = OTHER; note = 2'-O-methylguanosine-3'-phosphate
  modified_base 19: mod_base = OTHER; note = 2'-O-methyladenosine-3'-phosphate
  modified_base 20: mod_base = OTHER; note = 2'-O-methyladenosine-3'-phosphate
  modified_base 21: mod_base = OTHER; note = 2'-O-methyladenosine-3'-phosphate attached to N-[tris(N-acetylgalactosamine-alkyl)-amidodecanoyl)]-4-hydr oxyprolinol Hyp-(N-acetylgalactosamine-alkyl)3
gtcatcgaagacaaattgaaa

SEQ ID NO: 3592 - RNA, 21 nt, synthetic construct
  misc_feature 1..21: note = Description of Artificial Sequence: Synthetic oligonucleotide
  source 1..21: mol_type = other RNA
  modified_base 1: mod_base = OTHER; note = 2'-O-methylguanosine-3'- phosphorothioate
  modified_base 2: mod_base = OTHER; note = 2'-O-methyladenosine-3'- phosphorothioate
  modified_base 3: mod_base = OTHER; note = 2'-O-methyladenosine-3'-phosphate
  modified_base 4: mod_base = OTHER; note = 2'-O-methylcytidine-3'-phosphate
  modified_base 5: mod_base = OTHER; note = 2'-O-methyladenosine-3'-phosphate
  modified_base 6: mod_base = OTHER; note = 2'-O-methylcytidine-3'-phosphate
  modified_base 7: mod_base = OTHER; note = 2'-fluorocytidine-3'-phosphate
  modified_base 8: mod_base = OTHER; note = 2'-O-methyladenosine-3'-phosphate
  modified_base 9: mod_base = OTHER; note = 2'-fluoroadenosine-3'-phosphate
  modified_base 10: mod_base = OTHER; note = 2'-fluoroadenosine-3'-phosphate
  modified_base 11: mod_base = OTHER; note = 2'-fluoroguanosine-3'-phosphate
  modified_base 12: mod_base = OTHER; note = 2'-O-methyladenosine-3'-phosphate
  modified_base 13: mod_base = OTHER; note = 2'-O-methyluridine-3'-phosphate
  modified_base 14: mod_base = OTHER; note = 2'-O-methyluridine-3'-phosphate
  modified_base 15: mod_base = OTHER; note = 2'-O-methylguanosine-3'-phosphate
  modified_base 16: mod_base = OTHER; note = 2'-O-methyluridine-3'-phosphate
  modified_base 17: mod_base = OTHER; note = 2'-O-methylcytidine-3'-phosphate
  modified_base 18: mod_base = OTHER; note = 2'-O-methyluridine-3'-phosphate
  modified_base 19: mod_base = OTHER; note = 2'-O-methylcytidine-3'-phosphate
  modified_base 20: mod_base = OTHER; note = 2'-O-methyluridine-3'-phosphate
  modified_base 21: mod_base = OTHER; note = 2'-O-methyladenosine-3'-phosphate attached to N-[tris(N-acetylgalactosamine-alkyl)-amidodecanoyl)]-4-hydr oxyprolinol Hyp-(N-acetylgalactosamine-alkyl)3
gaacaccaaagattgtctcta

SEQ ID NO: 3593 - RNA, 21 nt, synthetic construct
  misc_feature 1..21: note = Description of Artificial Sequence: Synthetic oligonucleotide
  source 1..21: mol_type = other RNA
  modified_base 1: mod_base = OTHER; note = 2'-O-methyladenosine-3'- phosphorothioate
  modified_base 2: mod_base = OTHER; note = 2'-O-methyladenosine-3'- phosphorothioate
  modified_base 3: mod_base = OTHER; note = 2'-O-methylcytidine-3'-phosphate
  modified_base 4: mod_base = OTHER; note = 2'-O-methyladenosine-3'-phosphate
  modified_base 5: mod_base = OTHER; note = 2'-O-methylcytidine-3'-phosphate
  modified_base 6: mod_base = OTHER; note = 2'-O-methylcytidine-3'-phosphate
  modified_base 7: mod_base = OTHER; note = 2'-fluoroadenosine-3'-phosphate
  modified_base 8: mod_base = OTHER; note = 2'-O-methyladenosine-3'-phosphate
  modified_base 9: mod_base = OTHER; note = 2'-fluoroadenosine-3'-phosphate
  modified_base 10: mod_base = OTHER; note = 2'-fluoroguanosine-3'-phosphate
  modified_base 11: mod_base = OTHER; note = 2'-fluoroadenosine-3'-phosphate
  modified_base 12: mod_base = OTHER; note = 2'-O-methyluridine-3'-phosphate
  modified_base 13: mod_base = OTHER; note = 2'-O-methyluridine-3'-phosphate
  modified_base 14: mod_base = OTHER; note = 2'-O-methylguanosine-3'-phosphate
  modified_base 15: mod_base = OTHER; note = 2'-O-methyluridine-3'-phosphate
  modified_base 16: mod_base = OTHER; note = 2'-O-methylcytidine-3'-phosphate
  modified_base 17: mod_base = OTHER; note = 2'-O-methyluridine-3'-phosphate
  modified_base 18: mod_base = OTHER; note = 2'-O-methylcytidine-3'-phosphate
  modified_base 19: mod_base = OTHER; note = 2'-O-methyluridine-3'-phosphate
  modified_base 20: mod_base = OTHER; note = 2'-O-methylguanosine-3'-phosphate
  modified_base 21: mod_base = OTHER; note = 2'-O-methyladenosine-3'-phosphate attached to N-[tris(N-acetylgalactosamine-alkyl)-amidodecanoyl)]-4-hydr oxyprolinol Hyp-(N-acetylgalactosamine-alkyl)3
aacaccaaagattgtctctga

SEQ ID NO: 3594 - RNA, 21 nt, synthetic construct
  misc_feature 1..21: note = Description of Artificial Sequence: Synthetic oligonucleotide
  source 1..21: mol_type = other RNA
  modified_base 1: mod_base = OTHER; note = 2'-O-methyladenosine-3'- phosphorothioate
  modified_base 2: mod_base = OTHER; note = 2'-O-methyluridine-3'-phosphorothioate
  modified_base 3: mod_base = OTHER; note = 2'-O-methylguanosine-3'-phosphate
  modified_base 4: mod_base = OTHER; note = 2'-O-methyluridine-3'-phosphate
  modified_base 5: mod_base = OTHER; note = 2'-O-methyluridine-3'-phosphate
  modified_base 6: mod_base = OTHER; note = 2'-O-methylguanosine-3'-phosphate
  modified_base 7: mod_base = OTHER; note = 2'-fluorouridine-3'-phosphate
  modified_base 8: mod_base = OTHER; note = 2'-O-methylcytidine-3'-phosphate
  modified_base 9: mod_base = OTHER; note = 2'-fluorocytidine-3'-phosphate
  modified_base 10: mod_base = OTHER; note = 2'-fluorouridine-3'-phosphate
  modified_base 11: mod_base = OTHER; note = 2'-fluorouridine-3'-phosphate
  modified_base 12: mod_base = OTHER; note = 2'-O-methyluridine-3'-phosphate
  modified_base 13: mod_base = OTHER; note = 2'-O-methyluridine-3'-phosphate
  modified_base 14: mod_base = OTHER; note = 2'-O-methyluridine-3'-phosphate
  modified_base 15: mod_base = OTHER; note = 2'-O-methyladenosine-3'-phosphate
  modified_base 16: mod_base = OTHER; note = 2'-O-methyluridine-3'-phosphate
  modified_base 17: mod_base = OTHER; note = 2'-O-methylcytidine-3'-phosphate
  modified_base 18: mod_base = OTHER; note = 2'-O-methyluridine-3'-phosphate
  modified_base 19: mod_base = OTHER; note = 2'-O-methylguanosine-3'-phosphate
  modified_base 20: mod_base = OTHER; note = 2'-O-methyladenosine-3'-phosphate
  modified_base 21: mod_base = OTHER; note = 2'-O-methyluridine-3'-phosphate attached to N-[tris(N-acetylgalactosamine-alkyl)-amidodecanoyl)]-4-hydr oxyprolinol Hyp-(N-acetylgalactosamine-alkyl)3
atgttgtcctttttatctgat

SEQ ID NO: 3595 - RNA, 21 nt, synthetic construct
  misc_feature 1..21: note = Description of Artificial Sequence: Synthetic oligonucleotide
  source 1..21: mol_type = other RNA
  modified_base 1: mod_base = OTHER; note = 2'-O-methyluridine-3'-phosphorothioate
  modified_base 2: mod_base = OTHER; note = 2'-O-methylcytidine-3'- phosphorothioate
  modified_base 3: mod_base = OTHER; note = 2'-O-methyladenosine-3'-phosphate
  modified_base 4: mod_base = OTHER; note = 2'-O-methyladenosine-3'-phosphate
  modified_base 5: mod_base = OTHER; note = 2'-O-methylcytidine-3'-phosphate
  modified_base 6: mod_base = OTHER; note = 2'-O-methyluridine-3'-phosphate
  modified_base 7: mod_base = OTHER; note = 2'-fluorocytidine-3'-phosphate
  modified_base 8: mod_base = OTHER; note = 2'-O-methylcytidine-3'-phosphate
  modified_base 9: mod_base = OTHER; note = 2'-fluorouridine-3'-phosphate
  modified_base 10: mod_base = OTHER; note = 2'-fluoroguanosine-3'-phosphate
  modified_base 11: mod_base = OTHER; note = 2'-fluoroadenosine-3'-phosphate
  modified_base 12: mod_base = OTHER; note = 2'-O-methyladenosine-3'-phosphate
  modified_base 13: mod_base = OTHER; note = 2'-O-methylguanosine-3'-phosphate
  modified_base 14: mod_base = OTHER; note = 2'-O-methyluridine-3'-phosphate
  modified_base 15: mod_base = OTHER; note = 2'-O-methyluridine-3'-phosphate
  modified_base 16: mod_base = OTHER; note = 2'-O-methyladenosine-3'-phosphate
  modified_base 17: mod_base = OTHER; note = 2'-O-methylguanosine-3'-phosphate
  modified_base 18: mod_base = OTHER; note = 2'-O-methyladenosine-3'-phosphate
  modified_base 19: mod_base = OTHER; note = 2'-O-methyladenosine-3'-phosphate
  modified_base 20: mod_base = OTHER; note = 2'-O-methyladenosine-3'-phosphate
  modified_base 21: mod_base = OTHER; note = 2'-O-methyluridine-3'-phosphate attached to N-[tris(N-acetylgalactosamine-alkyl)-amidodecanoyl)]-4-hydr oxyprolinol Hyp-(N-acetylgalactosamine-alkyl)3
tcaactcctgaagttagaaat

SEQ ID NO: 3596 - RNA, 21 nt, synthetic construct
  misc_feature 1..21: note = Description of Artificial Sequence: Synthetic oligonucleotide
  source 1..21: mol_type = other RNA
  modified_base 1: mod_base = OTHER; note = 2'-O-methyladenosine-3'- phosphorothioate
  modified_base 2: mod_base = OTHER; note = 2'-O-methyladenosine-3'- phosphorothioate
  modified_base 3: mod_base = OTHER; note = 2'-O-methylcytidine-3'-phosphate
  modified_base 4: mod_base = OTHER; note = 2'-O-methyluridine-3'-phosphate
  modified_base 5: mod_base = OTHER; note = 2'-O-methyladenosine-3'-phosphate
  modified_base 6: mod_base = OTHER; note = 2'-O-methyluridine-3'-phosphate
  modified_base 7: mod_base = OTHER; note = 2'-fluorocytidine-3'-phosphate
  modified_base 8: mod_base = OTHER; note = 2'-O-methylcytidine-3'-phosphate
  modified_base 9: mod_base = OTHER; note = 2'-fluoroadenosine-3'-phosphate
  modified_base 10: mod_base = OTHER; note = 2'-fluoroadenosine-3'-phosphate
  modified_base 11: mod_base = OTHER; note = 2'-fluoroguanosine-3'-phosphate
  modified_base 12: mod_base = OTHER; note = 2'-O-methyluridine-3'-phosphate
  modified_base 13: mod_base = OTHER; note = 2'-O-methylguanosine-3'-phosphate
  modified_base 14: mod_base = OTHER; note = 2'-O-methyluridine-3'-phosphate
  modified_base 15: mod_base = OTHER; note = 2'-O-methyluridine-3'-phosphate
  modified_base 16: mod_base = OTHER; note = 2'-O-methyladenosine-3'-phosphate
  modified_base 17: mod_base = OTHER; note = 2'-O-methyluridine-3'-phosphate
  modified_base 18: mod_base = OTHER; note = 2'-O-methyladenosine-3'-phosphate
  modified_base 19: mod_base = OTHER; note = 2'-O-methylcytidine-3'-phosphate
  modified_base 20: mod_base = OTHER; note = 2'-O-methylcytidine-3'-phosphate
  modified_base 21: mod_base = OTHER; note = 2'-O-methyladenosine-3'-phosphate attached to N-[tris(N-acetylgalactosamine-alkyl)-amidodecanoyl)]-4-hydr oxyprolinol Hyp-(N-acetylgalactosamine-alkyl)3
aactatccaagtgttatacca

SEQ ID NO: 3597 - RNA, 21 nt, synthetic construct
  misc_feature 1..21: note = Description of Artificial Sequence: Synthetic oligonucleotide
  source 1..21: mol_type = other RNA
  modified_base 1: mod_base = OTHER; note = 2'-O-methyluridine-3'-phosphorothioate
  modified_base 2: mod_base = OTHER; note = 2'-O-methylcytidine-3'- phosphorothioate
  modified_base 3: mod_base = OTHER; note = 2'-O-methylcytidine-3'-phosphate
  modified_base 4: mod_base = OTHER; note = 2'-O-methyluridine-3'-phosphate
  modified_base 5: mod_base = OTHER; note = 2'-O-methyluridine-3'-phosphate
  modified_base 6: mod_base = OTHER; note = 2'-O-methyladenosine-3'-phosphate
  modified_base 7: mod_base = OTHER; note = 2'-fluoroguanosine-3'-phosphate
  modified_base 8: mod_base = OTHER; note = 2'-O-methyladenosine-3'-phosphate
  modified_base 9: mod_base = OTHER; note = 2'-fluoroadenosine-3'-phosphate
  modified_base 10: mod_base = OTHER; note = 2'-fluorocytidine-3'-phosphate
  modified_base 11: mod_base = OTHER; note = 2'-fluoroadenosine-3'-phosphate
  modified_base 12: mod_base = OTHER; note = 2'-O-methylcytidine-3'-phosphate
  modified_base 13: mod_base = OTHER; note = 2'-O-methylcytidine-3'-phosphate
  modified_base 14: mod_base = OTHER; note = 2'-O-methyladenosine-3'-phosphate
  modified_base 15: mod_base = OTHER; note = 2'-O-methyladenosine-3'-phosphate
  modified_base 16: mod_base = OTHER; note = 2'-O-methyladenosine-3'-phosphate
  modified_base 17: mod_base = OTHER; note = 2'-O-methylguanosine-3'-phosphate
  modified_base 18: mod_base = OTHER; note = 2'-O-methyladenosine-3'-phosphate
  modified_base 19: mod_base = OTHER; note = 2'-O-methyluridine-3'-phosphate
  modified_base 20: mod_base = OTHER; note = 2'-O-methyluridine-3'-phosphate
  modified_base 21: mod_base = OTHER; note = 2'-O-methyladenosine-3'-phosphate attached to N-[tris(N-acetylgalactosamine-alkyl)-amidodecanoyl)]-4-hydr oxyprolinol Hyp-(N-acetylgalactosamine-alkyl)3
tccttagaacaccaaagatta

SEQ ID NO: 3598 - RNA, 21 nt, synthetic construct
  misc_feature 1..21: note = Description of Artificial Sequence: Synthetic oligonucleotide
  source 1..21: mol_type = other RNA
  modified_base 1: mod_base = OTHER; note = 2'-O-methylguanosine-3'- phosphorothioate
  modified_base 2: mod_base = OTHER; note = 2'-O-methylguanosine-3'- phosphorothioate
  modified_base 3: mod_base = OTHER; note = 2'-O-methyluridine-3'-phosphate
  modified_base 4: mod_base = OTHER; note = 2'-O-methyladenosine-3'-phosphate
  modified_base 5: mod_base = OTHER; note = 2'-O-methyluridine-3'-phosphate
  modified_base 6: mod_base = OTHER; note = 2'-O-methyluridine-3'-phosphate
  modified_base 7: mod_base = OTHER; note = 2'-fluoroadenosine-3'-phosphate
  modified_base 8: mod_base = OTHER; note = 2'-O-methyladenosine-3'-phosphate
  modified_base 9: mod_base = OTHER; note = 2'-fluorouridine-3'-phosphate
  modified_base 10: mod_base = OTHER; note = 2'-fluorocytidine-3'-phosphate
  modified_base 11: mod_base = OTHER; note = 2'-fluorouridine-3'-phosphate
  modified_base 12: mod_base = OTHER; note = 2'-O-methyluridine-3'-phosphate
  modified_base 13: mod_base = OTHER; note = 2'-O-methylguanosine-3'-phosphate
  modified_base 14: mod_base = OTHER; note = 2'-O-methyluridine-3'-phosphate
  modified_base 15: mod_base = OTHER; note = 2'-O-methylguanosine-3'-phosphate
  modified_base 16: mod_base = OTHER; note = 2'-O-methyluridine-3'-phosphate
  modified_base 17: mod_base = OTHER; note = 2'-O-methyladenosine-3'-phosphate
  modified_base 18: mod_base = OTHER; note = 2'-O-methylguanosine-3'-phosphate
  modified_base 19: mod_base = OTHER; note = 2'-O-methyluridine-3'-phosphate
  modified_base 20: mod_base = OTHER; note = 2'-O-methylcytidine-3'-phosphate
  modified_base 21: mod_base = OTHER; note = 2'-O-methyluridine-3'-phosphate attached to N-[tris(N-acetylgalactosamine-alkyl)-amidodecanoyl)]-4-hydr oxyprolinol Hyp-(N-acetylgalactosamine-alkyl)3
ggtattaatcttgtgtagtct

SEQ ID NO: 3599 - RNA, 21 nt, synthetic construct
  misc_feature 1..21: note = Description of Artificial Sequence: Synthetic oligonucleotide
  source 1..21: mol_type = other RNA
  modified_base 1: mod_base = OTHER; note = 2'-O-methylguanosine-3'- phosphorothioate
  modified_base 2: mod_base = OTHER; note = 2'-O-methylguanosine-3'- phosphorothioate
  modified_base 3: mod_base = OTHER; note = 2'-O-methylcytidine-3'-phosphate
  modified_base 4: mod_base = OTHER; note = 2'-O-methyluridine-3'-phosphate
  modified_base 5: mod_base = OTHER; note = 2'-O-methylcytidine-3'-phosphate
  modified_base 6: mod_base = OTHER; note = 2'-O-methylcytidine-3'-phosphate
  modified_base 7: mod_base = OTHER; note = 2'-fluorouridine-3'-phosphate
  modified_base 8: mod_base = OTHER; note = 2'-O-methyluridine-3'-phosphate
  modified_base 9: mod_base = OTHER; note = 2'-fluorocytidine-3'-phosphate
  modified_base 10: mod_base = OTHER; note = 2'-fluoroadenosine-3'-phosphate
  modified_base 11: mod_base = OTHER; note = 2'-fluorocytidine-3'-phosphate
  modified_base 12: mod_base = OTHER; note = 2'-O-methyluridine-3'-phosphate
  modified_base 13: mod_base = OTHER; note = 2'-O-methylguanosine-3'-phosphate
  modified_base 14: mod_base = OTHER; note = 2'-O-methyladenosine-3'-phosphate
  modified_base 15: mod_base = OTHER; note = 2'-O-methyladenosine-3'-phosphate
  modified_base 16: mod_base = OTHER; note = 2'-O-methylcytidine-3'-phosphate
  modified_base 17: mod_base = OTHER; note = 2'-O-methyladenosine-3'-phosphate
  modified_base 18: mod_base = OTHER; note = 2'-O-methyluridine-3'-phosphate
  modified_base 19: mod_base = OTHER; note = 2'-O-methylguanosine-3'-phosphate
  modified_base 20: mod_base = OTHER; note = 2'-O-methylcytidine-3'-phosphate
  modified_base 21: mod_base = OTHER; note = 2'-O-methyladenosine-3'-phosphate attached to N-[tris(N-acetylgalactosamine-alkyl)-amidodecanoyl)]-4-hydr oxyprolinol Hyp-(N-acetylgalactosamine-alkyl)3
ggctccttcactgaacatgca

SEQ ID NO: 3600 - RNA, 21 nt, synthetic construct
  misc_feature 1..21: note = Description of Artificial Sequence: Synthetic oligonucleotide
  source 1..21: mol_type = other RNA
  modified_base 1: mod_base = OTHER; note = 2'-O-methyluridine-3'-phosphorothioate
  modified_base 2: mod_base = OTHER; note = 2'-O-methyladenosine-3'- phosphorothioate
  modified_base 3: mod_base = OTHER; note = 2'-O-methyluridine-3'-phosphate
  modified_base 4: mod_base = OTHER; note = 2'-O-methylcytidine-3'-phosphate
  modified_base 5: mod_base = OTHER; note = 2'-O-methyladenosine-3'-phosphate
  modified_base 6: mod_base = OTHER; note = 2'-O-methylguanosine-3'-phosphate
  modified_base 7: mod_base = OTHER; note = 2'-fluorouridine-3'-phosphate
  modified_base 8: mod_base = OTHER; note = 2'-O-methyladenosine-3'-phosphate
  modified_base 9: mod_base = OTHER; note = 2'-fluoroguanosine-3'-phosphate
  modified_base 10: mod_base = OTHER; note = 2'-fluorouridine-3'-phosphate
  modified_base 11: mod_base = OTHER; note = 2'-fluoroguanosine-3'-phosphate
  modified_base 12: mod_base = OTHER; note = 2'-O-methyluridine-3'-phosphate
  modified_base 13: mod_base = OTHER; note = 2'-O-methyladenosine-3'-phosphate
  modified_base 14: mod_base = OTHER; note = 2'-O-methylcytidine-3'-phosphate
  modified_base 15: mod_base = OTHER; note = 2'-O-methyladenosine-3'-phosphate
  modified_base 16: mod_base = OTHER; note = 2'-O-methyluridine-3'-phosphate
  modified_base 17: mod_base = OTHER; note = 2'-O-methyluridine-3'-phosphate
  modified_base 18: mod_base = OTHER; note = 2'-O-methyladenosine-3'-phosphate
  modified_base 19: mod_base = OTHER; note = 2'-O-methylcytidine-3'-phosphate
  modified_base 20: mod_base = OTHER; note = 2'-O-methylcytidine-3'-phosphate
  modified_base 21: mod_base = OTHER; note = 2'-O-methyladenosine-3'-phosphate attached to N-[tris(N-acetylgalactosamine-alkyl)-amidodecanoyl)]-4-hydr oxyprolinol Hyp-(N-acetylgalactosamine-alkyl)3
tatcagtagtgtacattacca

SEQ ID NO: 3601 - RNA, 21 nt, synthetic construct
  misc_feature 1..21: note = Description of Artificial Sequence: Synthetic oligonucleotide
  source 1..21: mol_type = other RNA
  modified_base 1: mod_base = OTHER; note = 2'-O-methylcytidine-3'- phosphorothioate
  modified_base 2: mod_base = OTHER; note = 2'-O-methyladenosine-3'- phosphorothioate
  modified_base 3: mod_base = OTHER; note = 2'-O-methylguanosine-3'-phosphate
  modified_base 4: mod_base = OTHER; note = 2'-O-methylcytidine-3'-phosphate
  modified_base 5: mod_base = OTHER; note = 2'-O-methylcytidine-3'-phosphate
  modified_base 6: mod_base = OTHER; note = 2'-O-methyluridine-3'-phosphate
  modified_base 7: mod_base = OTHER; note = 2'-fluorouridine-3'-phosphate
  modified_base 8: mod_base = OTHER; note = 2'-O-methyluridine-3'-phosphate
  modified_base 9: mod_base = OTHER; note = 2'-fluorouridine-3'-phosphate
  modified_base 10: mod_base = OTHER; note = 2'-fluorocytidine-3'-phosphate
  modified_base 11: mod_base = OTHER; note = 2'-fluorocytidine-3'-phosphate
  modified_base 12: mod_base = OTHER; note = 2'-O-methyluridine-3'-phosphate
  modified_base 13: mod_base = OTHER; note = 2'-O-methyluridine-3'-phosphate
  modified_base 14: mod_base = OTHER; note = 2'-O-methyladenosine-3'-phosphate
  modified_base 15: mod_base = OTHER; note = 2'-O-methylguanosine-3'-phosphate
  modified_base 16: mod_base = OTHER; note = 2'-O-methyladenosine-3'-phosphate
  modified_base 17: mod_base = OTHER; note = 2'-O-methyladenosine-3'-phosphate
  modified_base 18: mod_base = OTHER; note = 2'-O-methylcytidine-3'-phosphate
  modified_base 19: mod_base = OTHER; note = 2'-O-methyladenosine-3'-phosphate
  modified_base 20: mod_base = OTHER; note = 2'-O-methylcytidine-3'-phosphate
  modified_base 21: mod_base = OTHER; note = 2'-O-methyladenosine-3'-phosphate attached to N-[tris(N-acetylgalactosamine-alkyl)-amidodecanoyl)]-4-hydr oxyprolinol Hyp-(N-acetylgalactosamine-alkyl)3
cagccttttccttagaacaca

SEQ ID NO: 3602 - RNA, 21 nt, synthetic construct
  misc_feature 1..21: note = Description of Artificial Sequence: Synthetic oligonucleotide
  source 1..21: mol_type = other RNA
  modified_base 1: mod_base = OTHER; note = 2'-O-methylcytidine-3'- phosphorothioate
  modified_base 2: mod_base = OTHER; note = 2'-O-methyluridine-3'-phosphorothioate
  modified_base 3: mod_base = OTHER; note = 2'-O-methylguanosine-3'-phosphate
  modified_base 4: mod_base = OTHER; note = 2'-O-methylguanosine-3'-phosphate
  modified_base 5: mod_base = OTHER; note = 2'-O-methyluridine-3'-phosphate
  modified_base 6: mod_base = OTHER; note = 2'-O-methyluridine-3'-phosphate
  modified_base 7: mod_base = OTHER; note = 2'-fluoroadenosine-3'-phosphate
  modified_base 8: mod_base = OTHER; note = 2'-O-methylguanosine-3'-phosphate
  modified_base 9: mod_base = OTHER; note = 2'-fluorouridine-3'-phosphate
  modified_base 10: mod_base = OTHER; note = 2'-fluoroguanosine-3'-phosphate
  modified_base 11: mod_base = OTHER; note = 2'-fluorouridine-3'-phosphate
  modified_base 12: mod_base = OTHER; note = 2'-O-methylguanosine-3'-phosphate
  modified_base 13: mod_base = OTHER; note = 2'-O-methyladenosine-3'-phosphate
  modified_base 14: mod_base = OTHER; note = 2'-O-methyladenosine-3'-phosphate
  modified_base 15: mod_base = OTHER; note = 2'-O-methyladenosine-3'-phosphate
  modified_base 16: mod_base = OTHER; note = 2'-O-methyluridine-3'-phosphate
  modified_base 17: mod_base = OTHER; note = 2'-O-methyladenosine-3'-phosphate
  modified_base 18: mod_base = OTHER; note = 2'-O-methylguanosine-3'-phosphate
  modified_base 19: mod_base = OTHER; note = 2'-O-methyluridine-3'-phosphate
  modified_base 20: mod_base = OTHER; note = 2'-O-methyluridine-3'-phosphate
  modified_base 21: mod_base = OTHER; note = 2'-O-methyladenosine-3'-phosphate attached to N-[tris(N-acetylgalactosamine-alkyl)-amidodecanoyl)]-4-hydr oxyprolinol Hyp-(N-acetylgalactosamine-alkyl)3
ctggttagtgtgaaatagtta

SEQ ID NO: 3603 - RNA, 21 nt, synthetic construct
  misc_feature 1..21: note = Description of Artificial Sequence: Synthetic oligonucleotide
  source 1..21: mol_type = other RNA
  modified_base 1: mod_base = OTHER; note = 2'-O-methyladenosine-3'- phosphorothioate
  modified_base 2: mod_base = OTHER; note = 2'-O-methylcytidine-3'- phosphorothioate
  modified_base 3: mod_base = OTHER; note = 2'-O-methyluridine-3'-phosphate
  modified_base 4: mod_base = OTHER; note = 2'-O-methyladenosine-3'-phosphate
  modified_base 5: mod_base = OTHER; note = 2'-O-methyluridine-3'-phosphate
  modified_base 6: mod_base = OTHER; note = 2'-O-methyladenosine-3'-phosphate
  modified_base 7: mod_base = OTHER; note = 2'-fluorouridine-3'-phosphate
  modified_base 8: mod_base = OTHER; note = 2'-O-methylcytidine-3'-phosphate
  modified_base 9: mod_base = OTHER; note = 2'-fluoroadenosine-3'-phosphate
  modified_base 10: mod_base = OTHER; note = 2'-fluoroguanosine-3'-phosphate
  modified_base 11: mod_base = OTHER; note = 2'-fluorouridine-3'-phosphate
  modified_base 12: mod_base = OTHER; note = 2'-O-methyladenosine-3'-phosphate
  modified_base 13: mod_base = OTHER; note = 2'-O-methylguanosine-3'-phosphate
  modified_base 14: mod_base = OTHER; note = 2'-O-methyluridine-3'-phosphate
  modified_base 15: mod_base = OTHER; note = 2'-O-methylguanosine-3'-phosphate
  modified_base 16: mod_base = OTHER; note = 2'-O-methyluridine-3'-phosphate
  modified_base 17: mod_base = OTHER; note = 2'-O-methyladenosine-3'-phosphate
  modified_base 18: mod_base = OTHER; note = 2'-O-methylcytidine-3'-phosphate
  modified_base 19: mod_base = OTHER; note = 2'-O-methyladenosine-3'-phosphate
  modified_base 20: mod_base = OTHER; note = 2'-O-methyluridine-3'-phosphate
  modified_base 21: mod_base = OTHER; note = 2'-O-methyluridine-3'-phosphate attached to N-[tris(N-acetylgalactosamine-alkyl)-amidodecanoyl)]-4-hydr oxyprolinol Hyp-(N-acetylgalactosamine-alkyl)3
actatatcagtagtgtacatt

SEQ ID NO: 3604 - RNA, 21 nt, synthetic construct
  misc_feature 1..21: note = Description of Artificial Sequence: Synthetic oligonucleotide
  source 1..21: mol_type = other RNA
  modified_base 1: mod_base = OTHER; note = 2'-O-methyluridine-3'-phosphorothioate
  modified_base 2: mod_base = OTHER; note = 2'-O-methyladenosine-3'- phosphorothioate
  modified_base 3: mod_base = OTHER; note = 2'-O-methyluridine-3'-phosphate
  modified_base 4: mod_base = OTHER; note = 2'-O-methyladenosine-3'-phosphate
  modified_base 5: mod_base = OTHER; note = 2'-O-methyluridine-3'-phosphate
  modified_base 6: mod_base = OTHER; note = 2'-O-methylcytidine-3'-phosphate
  modified_base 7: mod_base = OTHER; note = 2'-fluoroadenosine-3'-phosphate
  modified_base 8: mod_base = OTHER; note = 2'-O-methylguanosine-3'-phosphate
  modified_base 9: mod_base = OTHER; note = 2'-fluorouridine-3'-phosphate
  modified_base 10: mod_base = OTHER; note = 2'-fluoroadenosine-3'-phosphate
  modified_base 11: mod_base = OTHER; note = 2'-fluoroguanosine-3'-phosphate
  modified_base 12: mod_base = OTHER; note = 2'-O-methyluridine-3'-phosphate
  modified_base 13: mod_base = OTHER; note = 2'-O-methylguanosine-3'-phosphate
  modified_base 14: mod_base = OTHER; note = 2'-O-methyluridine-3'-phosphate
  modified_base 15: mod_base = OTHER; note = 2'-O-methyladenosine-3'-phosphate
  modified_base 16: mod_base = OTHER; note = 2'-O-methylcytidine-3'-phosphate
  modified_base 17: mod_base = OTHER; note = 2'-O-methyladenosine-3'-phosphate
  modified_base 18: mod_base = OTHER; note = 2'-O-methyluridine-3'-phosphate
  modified_base 19: mod_base = OTHER; note = 2'-O-methyluridine-3'-phosphate
  modified_base 20: mod_base = OTHER; note = 2'-O-methyladenosine-3'-phosphate
  modified_base 21: mod_base = OTHER; note = 2'-O-methyladenosine-3'-phosphate attached to N-[tris(N-acetylgalactosamine-alkyl)-amidodecanoyl)]-4-hydr oxyprolinol Hyp-(N-acetylgalactosamine-alkyl)3
tatatcagtagtgtacattaa

SEQ ID NO: 3605 - RNA, 21 nt, synthetic construct
  misc_feature 1..21: note = Description of Artificial Sequence: Synthetic oligonucleotide
  source 1..21: mol_type = other RNA
  modified_base 1: mod_base = OTHER; note = 2'-O-methylguanosine-3'- phosphorothioate
  modified_base 2: mod_base = OTHER; note = 2'-O-methyluridine-3'-phosphorothioate
  modified_base 3: mod_base = OTHER; note = 2'-O-methyladenosine-3'-phosphate
  modified_base 4: mod_base = OTHER; note = 2'-O-methyladenosine-3'-phosphate
  modified_base 5: mod_base = OTHER; note = 2'-O-methyluridine-3'-phosphate
  modified_base 6: mod_base = OTHER; note = 2'-O-methyladenosine-3'-phosphate
  modified_base 7: mod_base = OTHER; note = 2'-fluorouridine-3'-phosphate
  modified_base 8: mod_base = OTHER; note = 2'-O-methyluridine-3'-phosphate
  modified_base 9: mod_base = OTHER; note = 2'-fluorouridine-3'-phosphate
  modified_base 10: mod_base = OTHER; note = 2'-fluorouridine-3'-phosphate
  modified_base 11: mod_base = OTHER; note = 2'-fluoroadenosine-3'-phosphate
  modified_base 12: mod_base = OTHER; note = 2'-O-methyladenosine-3'-phosphate
  modified_base 13: mod_base = OTHER; note = 2'-O-methylguanosine-3'-phosphate
  modified_base 14: mod_base = OTHER; note = 2'-O-methyladenosine-3'-phosphate
  modified_base 15: mod_base = OTHER; note = 2'-O-methyluridine-3'-phosphate
  modified_base 16: mod_base = OTHER; note = 2'-O-methylguanosine-3'-phosphate
  modified_base 17: mod_base = OTHER; note = 2'-O-methylguanosine-3'-phosphate
  modified_base 18: mod_base = OTHER; note = 2'-O-methyladenosine-3'-phosphate
  modified_base 19: mod_base = OTHER; note = 2'-O-methylcytidine-3'-phosphate
  modified_base 20: mod_base = OTHER; note = 2'-O-methyluridine-3'-phosphate
  modified_base 21: mod_base = OTHER; note = 2'-O-methyladenosine-3'-phosphate attached to N-[tris(N-acetylgalactosamine-alkyl)-amidodecanoyl)]-4-hydr oxyprolinol Hyp-(N-acetylgalactosamine-alkyl)3
gtaatattttaagatggacta

SEQ ID NO: 3606 - RNA, 21 nt, synthetic construct
  misc_feature 1..21: note = Description of Artificial Sequence: Synthetic oligonucleotide
  source 1..21: mol_type = other RNA
  modified_base 1: mod_base = OTHER; note = 2'-O-methyluridine-3'-phosphorothioate
  modified_base 2: mod_base = OTHER; note = 2'-O-methyluridine-3'-phosphorothioate
  modified_base 3: mod_base = OTHER; note = 2'-O-methyluridine-3'-phosphate
  modified_base 4: mod_base = OTHER; note = 2'-O-methyluridine-3'-phosphate
  modified_base 5: mod_base = OTHER; note = 2'-O-methyladenosine-3'-phosphate
  modified_base 6: mod_base = OTHER; note = 2'-O-methyladenosine-3'-phosphate
  modified_base 7: mod_base = OTHER; note = 2'-fluoroguanosine-3'-phosphate
  modified_base 8: mod_base = OTHER; note = 2'-O-methyladenosine-3'-phosphate
  modified_base 9: mod_base = OTHER; note = 2'-fluorouridine-3'-phosphate
  modified_base 10: mod_base = OTHER; note = 2'-fluoroguanosine-3'-phosphate
  modified_base 11: mod_base = OTHER; note = 2'-fluoroguanosine-3'-phosphate
  modified_base 12: mod_base = OTHER; note = 2'-O-methyladenosine-3'-phosphate
  modified_base 13: mod_base = OTHER; note = 2'-O-methylcytidine-3'-phosphate
  modified_base 14: mod_base = OTHER; note = 2'-O-methyluridine-3'-phosphate
  modified_base 15: mod_base = OTHER; note = 2'-O-methylguanosine-3'-phosphate
  modified_base 16: mod_base = OTHER; note = 2'-O-methylguanosine-3'-phosphate
  modified_base 17: mod_base = OTHER; note = 2'-O-methylguanosine-3'-phosphate
  modified_base 18: mod_base = OTHER; note = 2'-O-methyladenosine-3'-phosphate
  modified_base 19: mod_base = OTHER; note = 2'-O-methyladenosine-3'-phosphate
  modified_base 20: mod_base = OTHER; note = 2'-O-methyladenosine-3'-phosphate
  modified_base 21: mod_base = OTHER; note = 2'-O-methyladenosine-3'-phosphate attached to N-[tris(N-acetylgalactosamine-alkyl)-amidodecanoyl)]-4-hydr oxyprolinol Hyp-(N-acetylgalactosamine-alkyl)3
ttttaagatggactgggaaaa

SEQ ID NO: 3607 - RNA, 21 nt, synthetic construct
  misc_feature 1..21: note = Description of Artificial Sequence: Synthetic oligonucleotide
  source 1..21: mol_type = other RNA
  modified_base 1: mod_base = OTHER; note = 2'-O-methyluridine-3'-phosphorothioate
  modified_base 2: mod_base = OTHER; note = 2'-O-methylguanosine-3'- phosphorothioate
  modified_base 3: mod_base = OTHER; note = 2'-O-methylguanosine-3'-phosphate
  modified_base 4: mod_base = OTHER; note = 2'-O-methyluridine-3'-phosphate
  modified_base 5: mod_base = OTHER; note = 2'-O-methyluridine-3'-phosphate
  modified_base 6: mod_base = OTHER; note = 2'-O-methyladenosine-3'-phosphate
  modified_base 7: mod_base = OTHER; note = 2'-fluoroguanosine-3'-phosphate
  modified_base 8: mod_base = OTHER; note = 2'-O-methyluridine-3'-phosphate
  modified_base 9: mod_base = OTHER; note = 2'-fluoroguanosine-3'-phosphate
  modified_base 10: mod_base = OTHER; note = 2'-fluorouridine-3'-phosphate
  modified_base 11: mod_base = OTHER; note = 2'-fluoroguanosine-3'-phosphate
  modified_base 12: mod_base = OTHER; note = 2'-O-methyladenosine-3'-phosphate
  modified_base 13: mod_base = OTHER; note = 2'-O-methyladenosine-3'-phosphate
  modified_base 14: mod_base = OTHER; note = 2'-O-methyladenosine-3'-phosphate
  modified_base 15: mod_base = OTHER; note = 2'-O-methyluridine-3'-phosphate
  modified_base 16: mod_base = OTHER; note = 2'-O-methyladenosine-3'-phosphate
  modified_base 17: mod_base = OTHER; note = 2'-O-methylguanosine-3'-phosphate
  modified_base 18: mod_base = OTHER; note = 2'-O-methyluridine-3'-phosphate
  modified_base 19: mod_base = OTHER; note = 2'-O-methyluridine-3'-phosphate
  modified_base 20: mod_base = OTHER; note = 2'-O-methylcytidine-3'-phosphate
  modified_base 21: mod_base = OTHER; note = 2'-O-methyluridine-3'-phosphate attached to N-[tris(N-acetylgalactosamine-alkyl)-amidodecanoyl)]-4-hydr oxyprolinol Hyp-(N-acetylgalactosamine-alkyl)3
tggttagtgtgaaatagttct

SEQ ID NO: 3608 - RNA, 21 nt, synthetic construct
  misc_feature 1..21: note = Description of Artificial Sequence: Synthetic oligonucleotide
  source 1..21: mol_type = other RNA
  modified_base 1: mod_base = OTHER; note = 2'-O-methyluridine-3'-phosphorothioate
  modified_base 2: mod_base = OTHER; note = 2'-O-methyluridine-3'-phosphorothioate
  modified_base 3: mod_base = OTHER; note = 2'-O-methylcytidine-3'-phosphate
  modified_base 4: mod_base = OTHER; note = 2'-O-methyladenosine-3'-phosphate
  modified_base 5: mod_base = OTHER; note = 2'-O-methylcytidine-3'-phosphate
  modified_base 6: mod_base = OTHER; note = 2'-O-methyluridine-3'-phosphate
  modified_base 7: mod_base = OTHER; note = 2'-fluoroguanosine-3'-phosphate
  modified_base 8: mod_base = OTHER; note = 2'-O-methyladenosine-3'-phosphate
  modified_base 9: mod_base = OTHER; note = 2'-fluoroadenosine-3'-phosphate
  modified_base 10: mod_base = OTHER; note = 2'-fluorocytidine-3'-phosphate
  modified_base 11: mod_base = OTHER; note = 2'-fluoroadenosine-3'-phosphate
  modified_base 12: mod_base = OTHER; note = 2'-O-methyluridine-3'-phosphate
  modified_base 13: mod_base = OTHER; note = 2'-O-methylguanosine-3'-phosphate
  modified_base 14: mod_base = OTHER; note = 2'-O-methylcytidine-3'-phosphate
  modified_base 15: mod_base = OTHER; note = 2'-O-methylcytidine-3'-phosphate
  modified_base 16: mod_base = OTHER; note = 2'-O-methyluridine-3'-phosphate
  modified_base 17: mod_base = OTHER; note = 2'-O-methyladenosine-3'-phosphate
  modified_base 18: mod_base = OTHER; note = 2'-O-methylguanosine-3'-phosphate
  modified_base 19: mod_base = OTHER; note = 2'-O-methyluridine-3'-phosphate
  modified_base 20: mod_base = OTHER; note = 2'-O-methylcytidine-3'-phosphate
  modified_base 21: mod_base = OTHER; note = 2'-O-methyladenosine-3'-phosphate attached to N-[tris(N-acetylgalactosamine-alkyl)-amidodecanoyl)]-4-hydr oxyprolinol Hyp-(N-acetylgalactosamine-alkyl)3
ttcactgaacatgcctagtca

SEQ ID NO: 3609 - RNA, 21 nt, synthetic construct
  misc_feature 1..21: note = Description of Artificial Sequence: Synthetic oligonucleotide
  source 1..21: mol_type = other RNA
  modified_base 1: mod_base = OTHER; note = 2'-O-methyladenosine-3'- phosphorothioate
  modified_base 2: mod_base = OTHER; note = 2'-O-methylcytidine-3'- phosphorothioate
  modified_base 3: mod_base = OTHER; note = 2'-O-methylcytidine-3'-phosphate
  modified_base 4: mod_base = OTHER; note = 2'-O-methyladenosine-3'-phosphate
  modified_base 5: mod_base = OTHER; note = 2'-O-methyladenosine-3'-phosphate
  modified_base 6: mod_base = OTHER; note = 2'-O-methylcytidine-3'-phosphate
  modified_base 7: mod_base = OTHER; note = 2'-fluorouridine-3'-phosphate
  modified_base 8: mod_base = OTHER; note = 2'-O-methyladenosine-3'-phosphate
  modified_base 9: mod_base = OTHER; note = 2'-fluorouridine-3'-phosphate
  modified_base 10: mod_base = OTHER; note = 2'-fluorocytidine-3'-phosphate
  modified_base 11: mod_base = OTHER; note = 2'-fluorocytidine-3'-phosphate
  modified_base 12: mod_base = OTHER; note = 2'-O-methyladenosine-3'-phosphate
  modified_base 13: mod_base = OTHER; note = 2'-O-methyladenosine-3'-phosphate
  modified_base 14: mod_base = OTHER; note = 2'-O-methylguanosine-3'-phosphate
  modified_base 15: mod_base = OTHER; note = 2'-O-methyluridine-3'-phosphate
  modified_base 16: mod_base = OTHER; note = 2'-O-methylguanosine-3'-phosphate
  modified_base 17: mod_base = OTHER; note = 2'-O-methyluridine-3'-phosphate
  modified_base 18: mod_base = OTHER; note = 2'-O-methyluridine-3'-phosphate
  modified_base 19: mod_base = OTHER; note = 2'-O-methyladenosine-3'-phosphate
  modified_base 20: mod_base = OTHER; note = 2'-O-methyluridine-3'-phosphate
  modified_base 21: mod_base = OTHER; note = 2'-O-methyladenosine-3'-phosphate attached to N-[tris(N-acetylgalactosamine-alkyl)-amidodecanoyl)]-4-hydr oxyprolinol Hyp-(N-acetylgalactosamine-alkyl)3
accaactatccaagtgttata

SEQ ID NO: 3610 - RNA, 21 nt, synthetic construct
  misc_feature 1..21: note = Description of Artificial Sequence: Synthetic oligonucleotide
  source 1..21: mol_type = other RNA
  modified_base 1: mod_base = OTHER; note = 2'-O-methylcytidine-3'- phosphorothioate
  modified_base 2: mod_base = OTHER; note = 2'-O-methylcytidine-3'- phosphorothioate
  modified_base 3: mod_base = OTHER; note = 2'-O-methyladenosine-3'-phosphate
  modified_base 4: mod_base = OTHER; note = 2'-O-methyladenosine-3'-phosphate
  modified_base 5: mod_base = OTHER; note = 2'-O-methylguanosine-3'-phosphate
  modified_base 6: mod_base = OTHER; note = 2'-O-methyluridine-3'-phosphate
  modified_base 7: mod_base = OTHER; note = 2'-fluoroguanosine-3'-phosphate
  modified_base 8: mod_base = OTHER; note = 2'-O-methyluridine-3'-phosphate
  modified_base 9: mod_base = OTHER; note = 2'-fluorouridine-3'-phosphate
  modified_base 10: mod_base = OTHER; note = 2'-fluoroadenosine-3'-phosphate
  modified_base 11: mod_base = OTHER; note = 2'-fluorouridine-3'-phosphate
  modified_base 12: mod_base = OTHER; note = 2'-O-methyladenosine-3'-phosphate
  modified_base 13: mod_base = OTHER; note = 2'-O-methylcytidine-3'-phosphate
  modified_base 14: mod_base = OTHER; note = 2'-O-methylcytidine-3'-phosphate
  modified_base 15: mod_base = OTHER; note = 2'-O-methyladenosine-3'-phosphate
  modified_base 16: mod_base = OTHER; note = 2'-O-methyladenosine-3'-phosphate
  modified_base 17: mod_base = OTHER; note = 2'-O-methylcytidine-3'-phosphate
  modified_base 18: mod_base = OTHER; note = 2'-O-methyluridine-3'-phosphate
  modified_base 19: mod_base = OTHER; note = 2'-O-methyladenosine-3'-phosphate
  modified_base 20: mod_base = OTHER; note = 2'-O-methyladenosine-3'-phosphate
  modified_base 21: mod_base = OTHER; note = 2'-O-methyladenosine-3'-phosphate attached to N-[tris(N-acetylgalactosamine-alkyl)-amidodecanoyl)]-4-hydr oxyprolinol Hyp-(N-acetylgalactosamine-alkyl)3
ccaagtgttataccaactaaa

SEQ ID NO: 3611 - RNA, 21 nt, synthetic construct
  misc_feature 1..21: note = Description of Artificial Sequence: Synthetic oligonucleotide
  source 1..21: mol_type = other RNA
  modified_base 1: mod_base = OTHER; note = 2'-O-methyluridine-3'-phosphorothioate
  modified_base 2: mod_base = OTHER; note = 2'-O-methyluridine-3'-phosphorothioate
  modified_base 3: mod_base = OTHER; note = 2'-O-methylcytidine-3'-phosphate
  modified_base 4: mod_base = OTHER; note = 2'-O-methylcytidine-3'-phosphate
  modified_base 5: mod_base = OTHER; note = 2'-O-methyluridine-3'-phosphate
  modified_base 6: mod_base = OTHER; note = 2'-O-methyluridine-3'-phosphate
  modified_base 7: mod_base = OTHER; note = 2'-fluorouridine-3'-phosphate
  modified_base 8: mod_base = OTHER; note = 2'-O-methyluridine-3'-phosphate
  modified_base 9: mod_base = OTHER; note = 2'-fluoroguanosine-3'-phosphate
  modified_base 10: mod_base = OTHER; note = 2'-fluoroguanosine-3'-phosphate
  modified_base 11: mod_base = OTHER; note = 2'-fluorouridine-3'-phosphate
  modified_base 12: mod_base = OTHER; note = 2'-O-methyluridine-3'-phosphate
  modified_base 13: mod_base = OTHER; note = 2'-O-methylcytidine-3'-phosphate
  modified_base 14: mod_base = OTHER; note = 2'-O-methylcytidine-3'-phosphate
  modified_base 15: mod_base = OTHER; note = 2'-O-methyladenosine-3'-phosphate
  modified_base 16: mod_base = OTHER; note = 2'-O-methyladenosine-3'-phosphate
  modified_base 17: mod_base = OTHER; note = 2'-O-methylguanosine-3'-phosphate
  modified_base 18: mod_base = OTHER; note = 2'-O-methyluridine-3'-phosphate
  modified_base 19: mod_base = OTHER; note = 2'-O-methylcytidine-3'-phosphate
  modified_base 20: mod_base = OTHER; note = 2'-O-methylcytidine-3'-phosphate
  modified_base 21: mod_base = OTHER; note = 2'-O-methyladenosine-3'-phosphate attached to N-[tris(N-acetylgalactosamine-alkyl)-amidodecanoyl)]-4-hydr oxyprolinol Hyp-(N-acetylgalactosamine-alkyl)3
ttccttttggttccaagtcca

SEQ ID NO: 3612 - RNA, 21 nt, synthetic construct
  misc_feature 1..21: note = Description of Artificial Sequence: Synthetic oligonucleotide
  source 1..21: mol_type = other RNA
  modified_base 1: mod_base = OTHER; note = 2'-O-methylguanosine-3'- phosphorothioate
  modified_base 2: mod_base = OTHER; note = 2'-O-methylcytidine-3'- phosphorothioate
  modified_base 3: mod_base = OTHER; note = 2'-O-methyladenosine-3'-phosphate
  modified_base 4: mod_base = OTHER; note = 2'-O-methylguanosine-3'-phosphate
  modified_base 5: mod_base = OTHER; note = 2'-O-methylcytidine-3'-phosphate
  modified_base 6: mod_base = OTHER; note = 2'-O-methylcytidine-3'-phosphate
  modified_base 7: mod_base = OTHER; note = 2'-fluorouridine-3'-phosphate
  modified_base 8: mod_base = OTHER; note = 2'-O-methyluridine-3'-phosphate
  modified_base 9: mod_base = OTHER; note = 2'-fluorouridine-3'-phosphate
  modified_base 10: mod_base = OTHER; note = 2'-fluorouridine-3'-phosphate
  modified_base 11: mod_base = OTHER; note = 2'-fluorocytidine-3'-phosphate
  modified_base 12: mod_base = OTHER; note = 2'-O-methylcytidine-3'-phosphate
  modified_base 13: mod_base = OTHER; note = 2'-O-methyluridine-3'-phosphate
  modified_base 14: mod_base = OTHER; note = 2'-O-methyluridine-3'-phosphate
  modified_base 15: mod_base = OTHER; note = 2'-O-methyladenosine-3'-phosphate
  modified_base 16: mod_base = OTHER; note = 2'-O-methylguanosine-3'-phosphate
  modified_base 17: mod_base = OTHER; note = 2'-O-methyladenosine-3'-phosphate
  modified_base 18: mod_base = OTHER; note = 2'-O-methyladenosine-3'-phosphate
  modified_base 19: mod_base = OTHER; note = 2'-O-methylcytidine-3'-phosphate
  modified_base 20: mod_base = OTHER; note = 2'-O-methyladenosine-3'-phosphate
  modified_base 21: mod_base = OTHER; note = 2'-O-methyladenosine-3'-phosphate attached to N-[tris(N-acetylgalactosamine-alkyl)-amidodecanoyl)]-4-hydr oxyprolinol Hyp-(N-acetylgalactosamine-alkyl)3
gcagccttttccttagaacaa

SEQ ID NO: 3613 - RNA, 21 nt, synthetic construct
  misc_feature 1..21: note = Description of Artificial Sequence: Synthetic oligonucleotide
  source 1..21: mol_type = other RNA
  modified_base 1: mod_base = OTHER; note = 2'-O-methyladenosine-3'- phosphorothioate
  modified_base 2: mod_base = OTHER; note = 2'-O-methylguanosine-3'- phosphorothioate
  modified_base 3: mod_base = OTHER; note = 2'-O-methyluridine-3'-phosphate
  modified_base 4: mod_base = OTHER; note = 2'-O-methyladenosine-3'-phosphate
  modified_base 5: mod_base = OTHER; note = 2'-O-methyladenosine-3'-phosphate
  modified_base 6: mod_base = OTHER; note = 2'-O-methyluridine-3'-phosphate
  modified_base 7: mod_base = OTHER; note = 2'-fluoroadenosine-3'-phosphate
  modified_base 8: mod_base = OTHER; note = 2'-O-methyluridine-3'-phosphate
  modified_base 9: mod_base = OTHER; note = 2'-fluorouridine-3'-phosphate
  modified_base 10: mod_base = OTHER; note = 2'-fluorouridine-3'-phosphate
  modified_base 11: mod_base = OTHER; note = 2'-fluorouridine-3'-phosphate
  modified_base 12: mod_base = OTHER; note = 2'-O-methyladenosine-3'-phosphate
  modified_base 13: mod_base = OTHER; note = 2'-O-methyladenosine-3'-phosphate
  modified_base 14: mod_base = OTHER; note = 2'-O-methylguanosine-3'-phosphate
  modified_base 15: mod_base = OTHER; note = 2'-O-methyladenosine-3'-phosphate
  modified_base 16: mod_base = OTHER; note = 2'-O-methyluridine-3'-phosphate
  modified_base 17: mod_base = OTHER; note = 2'-O-methylguanosine-3'-phosphate
  modified_base 18: mod_base = OTHER; note = 2'-O-methylguanosine-3'-phosphate
  modified_base 19: mod_base = OTHER; note = 2'-O-methyladenosine-3'-phosphate
  modified_base 20: mod_base = OTHER; note = 2'-O-methylcytidine-3'-phosphate
  modified_base 21: mod_base = OTHER; note = 2'-O-methyluridine-3'-phosphate attached to N-[tris(N-acetylgalactosamine-alkyl)-amidodecanoyl)]-4-hydr oxyprolinol Hyp-(N-acetylgalactosamine-alkyl)3
agtaatattttaagatggact

SEQ ID NO: 3614 - RNA, 21 nt, synthetic construct
  misc_feature 1..21: note = Description of Artificial Sequence: Synthetic oligonucleotide
  source 1..21: mol_type = other RNA
  modified_base 1: mod_base = OTHER; note = 2'-O-methyladenosine-3'- phosphorothioate
  modified_base 2: mod_base = OTHER; note = 2'-O-methyladenosine-3'- phosphorothioate
  modified_base 3: mod_base = OTHER; note = 2'-O-methyladenosine-3'-phosphate
  modified_base 4: mod_base = OTHER; note = 2'-O-methyladenosine-3'-phosphate
  modified_base 5: mod_base = OTHER; note = 2'-O-methyluridine-3'-phosphate
  modified_base 6: mod_base = OTHER; note = 2'-O-methylcytidine-3'-phosphate
  modified_base 7: mod_base = OTHER; note = 2'-fluorocytidine-3'-phosphate
  modified_base 8: mod_base = OTHER; note = 2'-O-methyladenosine-3'-phosphate
  modified_base 9: mod_base = OTHER; note = 2'-fluorocytidine-3'-phosphate
  modified_base 10: mod_base = OTHER; note = 2'-fluoroadenosine-3'-phosphate
  modified_base 11: mod_base = OTHER; note = 2'-fluoroguanosine-3'-phosphate
  modified_base 12: mod_base = OTHER; note = 2'-O-methylcytidine-3'-phosphate
  modified_base 13: mod_base = OTHER; note = 2'-O-methyluridine-3'-phosphate
  modified_base 14: mod_base = OTHER; note = 2'-O-methyladenosine-3'-phosphate
  modified_base 15: mod_base = OTHER; note = 2'-O-methyluridine-3'-phosphate
  modified_base 16: mod_base = OTHER; note = 2'-O-methyladenosine-3'-phosphate
  modified_base 17: mod_base = OTHER; note = 2'-O-methyluridine-3'-phosphate
  modified_base 18: mod_base = OTHER; note = 2'-O-methylcytidine-3'-phosphate
  modified_base 19: mod_base = OTHER; note = 2'-O-methylcytidine-3'-phosphate
  modified_base 20: mod_base = OTHER; note = 2'-O-methyluridine-3'-phosphate
  modified_base 21: mod_base = OTHER; note = 2'-O-methyladenosine-3'-phosphate attached to N-[tris(N-acetylgalactosamine-alkyl)-amidodecanoyl)]-4-hydr oxyprolinol Hyp-(N-acetylgalactosamine-alkyl)3
aaaatccacagctatatccta

SEQ ID NO: 3615 - RNA, 21 nt, synthetic construct
  misc_feature 1..21: note = Description of Artificial Sequence: Synthetic oligonucleotide
  source 1..21: mol_type = other RNA
  modified_base 1: mod_base = OTHER; note = 2'-O-methyluridine-3'-phosphorothioate
  modified_base 2: mod_base = OTHER; note = 2'-O-methylcytidine-3'- phosphorothioate
  modified_base 3: mod_base = OTHER; note = 2'-O-methylcytidine-3'-phosphate
  modified_base 4: mod_base = OTHER; note = 2'-O-methyluridine-3'-phosphate
  modified_base 5: mod_base = OTHER; note = 2'-O-methyluridine-3'-phosphate
  modified_base 6: mod_base = OTHER; note = 2'-O-methylcytidine-3'-phosphate
  modified_base 7: mod_base = OTHER; note = 2'-fluoroadenosine-3'-phosphate
  modified_base 8: mod_base = OTHER; note = 2'-O-methylcytidine-3'-phosphate
  modified_base 9: mod_base = OTHER; note = 2'-fluorouridine-3'-phosphate
  modified_base 10: mod_base = OTHER; note = 2'-fluoroguanosine-3'-phosphate
  modified_base 11: mod_base = OTHER; note = 2'-fluoroadenosine-3'-phosphate
  modified_base 12: mod_base = OTHER; note = 2'-O-methyladenosine-3'-phosphate
  modified_base 13: mod_base = OTHER; note = 2'-O-methylcytidine-3'-phosphate
  modified_base 14: mod_base = OTHER; note = 2'-O-methyladenosine-3'-phosphate
  modified_base 15: mod_base = OTHER; note = 2'-O-methyluridine-3'-phosphate
  modified_base 16: mod_base = OTHER; note = 2'-O-methylguanosine-3'-phosphate
  modified_base 17: mod_base = OTHER; note = 2'-O-methylcytidine-3'-phosphate
  modified_base 18: mod_base = OTHER; note = 2'-O-methylcytidine-3'-phosphate
  modified_base 19: mod_base = OTHER; note = 2'-O-methyluridine-3'-phosphate
  modified_base 20: mod_base = OTHER; note = 2'-O-methyladenosine-3'-phosphate
  modified_base 21: mod_base = OTHER; note = 2'-O-methyladenosine-3'-phosphate attached to N-[tris(N-acetylgalactosamine-alkyl)-amidodecanoyl)]-4-hydr oxyprolinol Hyp-(N-acetylgalactosamine-alkyl)3
tccttcactgaacatgcctaa

SEQ ID NO: 3616 - RNA, 21 nt, synthetic construct
  misc_feature 1..21: note = Description of Artificial Sequence: Synthetic oligonucleotide
  source 1..21: mol_type = other RNA
  modified_base 1: mod_base = OTHER; note = 2'-O-methylcytidine-3'- phosphorothioate
  modified_base 2: mod_base = OTHER; note = 2'-O-methyladenosine-3'- phosphorothioate
  modified_base 3: mod_base = OTHER; note = 2'-O-methylcytidine-3'-phosphate
  modified_base 4: mod_base = OTHER; note = 2'-O-methyluridine-3'-phosphate
  modified_base 5: mod_base = OTHER; note = 2'-O-methylguanosine-3'-phosphate
  modified_base 6: mod_base = OTHER; note = 2'-O-methyladenosine-3'-phosphate
  modified_base 7: mod_base = OTHER; note = 2'-fluoroadenosine-3'-phosphate
  modified_base 8: mod_base = OTHER; note = 2'-O-methylcytidine-3'-phosphate
  modified_base 9: mod_base = OTHER; note = 2'-fluoroadenosine-3'-phosphate
  modified_base 10: mod_base = OTHER; note = 2'-fluorouridine-3'-phosphate
  modified_base 11: mod_base = OTHER; note = 2'-fluoroguanosine-3'-phosphate
  modified_base 12: mod_base = OTHER; note = 2'-O-methylcytidine-3'-phosphate
  modified_base 13: mod_base = OTHER; note = 2'-O-methylcytidine-3'-phosphate
  modified_base 14: mod_base = OTHER; note = 2'-O-methyluridine-3'-phosphate
  modified_base 15: mod_base = OTHER; note = 2'-O-methyladenosine-3'-phosphate
  modified_base 16: mod_base = OTHER; note = 2'-O-methylguanosine-3'-phosphate
  modified_base 17: mod_base = OTHER; note = 2'-O-methyluridine-3'-phosphate
  modified_base 18: mod_base = OTHER; note = 2'-O-methylcytidine-3'-phosphate
  modified_base 19: mod_base = OTHER; note = 2'-O-methylcytidine-3'-phosphate
  modified_base 20: mod_base = OTHER; note = 2'-O-methyladenosine-3'-phosphate
  modified_base 21: mod_base = OTHER; note = 2'-O-methyladenosine-3'-phosphate attached to N-[tris(N-acetylgalactosamine-alkyl)-amidodecanoyl)]-4-hydr oxyprolinol Hyp-(N-acetylgalactosamine-alkyl)3
cactgaacatgcctagtccaa

SEQ ID NO: 3617 - RNA, 21 nt, synthetic construct
  misc_feature 1..21: note = Description of Artificial Sequence: Synthetic oligonucleotide
  source 1..21: mol_type = other RNA
  modified_base 1: mod_base = OTHER; note = 2'-O-methyladenosine-3'- phosphorothioate
  modified_base 2: mod_base = OTHER; note = 2'-O-methyladenosine-3'- phosphorothioate
  modified_base 3: mod_base = OTHER; note = 2'-O-methylguanosine-3'-phosphate
  modified_base 4: mod_base = OTHER; note = 2'-O-methyluridine-3'-phosphate
  modified_base 5: mod_base = OTHER; note = 2'-O-methylguanosine-3'-phosphate
  modified_base 6: mod_base = OTHER; note = 2'-O-methyluridine-3'-phosphate
  modified_base 7: mod_base = OTHER; note = 2'-fluorouridine-3'-phosphate
  modified_base 8: mod_base = OTHER; note = 2'-O-methyladenosine-3'-phosphate
  modified_base 9: mod_base = OTHER; note = 2'-fluorouridine-3'-phosphate
  modified_base 10: mod_base = OTHER; note = 2'-fluoroadenosine-3'-phosphate
  modified_base 11: mod_base = OTHER; note = 2'-fluorocytidine-3'-phosphate
  modified_base 12: mod_base = OTHER; note = 2'-O-methylcytidine-3'-phosphate
  modified_base 13: mod_base = OTHER; note = 2'-O-methyladenosine-3'-phosphate
  modified_base 14: mod_base = OTHER; note = 2'-O-methyladenosine-3'-phosphate
  modified_base 15: mod_base = OTHER; note = 2'-O-methylcytidine-3'-phosphate
  modified_base 16: mod_base = OTHER; note = 2'-O-methyluridine-3'-phosphate
  modified_base 17: mod_base = OTHER; note = 2'-O-methyladenosine-3'-phosphate
  modified_base 18: mod_base = OTHER; note = 2'-O-methyladenosine-3'-phosphate
  modified_base 19: mod_base = OTHER; note = 2'-O-methyladenosine-3'-phosphate
  modified_base 20: mod_base = OTHER; note = 2'-O-methyladenosine-3'-phosphate
  modified_base 21: mod_base = OTHER; note = 2'-O-methylcytidine-3'-phosphate attached to N-[tris(N-acetylgalactosamine-alkyl)-amidodecanoyl)]-4-hydr oxyprolinol Hyp-(N-acetylgalactosamine-alkyl)3
aagtgttataccaactaaaac

SEQ ID NO: 3618 - RNA, 21 nt, synthetic construct
  misc_feature 1..21: note = Description of Artificial Sequence: Synthetic oligonucleotide
  source 1..21: mol_type = other RNA
  modified_base 1: mod_base = OTHER; note = 2'-O-methyluridine-3'-phosphorothioate
  modified_base 2: mod_base = OTHER; note = 2'-O-methyluridine-3'-phosphorothioate
  modified_base 3: mod_base = OTHER; note = 2'-O-methylcytidine-3'-phosphate
  modified_base 4: mod_base = OTHER; note = 2'-O-methylcytidine-3'-phosphate
  modified_base 5: mod_base = OTHER; note = 2'-O-methyladenosine-3'-phosphate
  modified_base 6: mod_base = OTHER; note = 2'-O-methylcytidine-3'-phosphate
  modified_base 7: mod_base = OTHER; note = 2'-fluorocytidine-3'-phosphate
  modified_base 8: mod_base = OTHER; note = 2'-O-methyladenosine-3'-phosphate
  modified_base 9: mod_base = OTHER; note = 2'-fluorouridine-3'-phosphate
  modified_base 10: mod_base = OTHER; note = 2'-fluoroguanosine-3'-phosphate
  modified_base 11: mod_base = OTHER; note = 2'-fluoroadenosine-3'-phosphate
  modified_base 12: mod_base = OTHER; note = 2'-O-methyluridine-3'-phosphate
  modified_base 13: mod_base = OTHER; note = 2'-O-methyluridine-3'-phosphate
  modified_base 14: mod_base = OTHER; note = 2'-O-methyladenosine-3'-phosphate
  modified_base 15: mod_base = OTHER; note = 2'-O-methyladenosine-3'-phosphate
  modified_base 16: mod_base = OTHER; note = 2'-O-methylguanosine-3'-phosphate
  modified_base 17: mod_base = OTHER; note = 2'-O-methylguanosine-3'-phosphate
  modified_base 18: mod_base = OTHER; note = 2'-O-methylguanosine-3'-phosphate
  modified_base 19: mod_base = OTHER; note = 2'-O-methyluridine-3'-phosphate
  modified_base 20: mod_base = OTHER; note = 2'-O-methylcytidine-3'-phosphate
  modified_base 21: mod_base = OTHER; note = 2'-O-methyluridine-3'-phosphate attached to N-[tris(N-acetylgalactosamine-alkyl)-amidodecanoyl)]-4-hydr oxyprolinol Hyp-(N-acetylgalactosamine-alkyl)3
ttccaccatgattaagggtct

SEQ ID NO: 3619 - RNA, 21 nt, synthetic construct
  misc_feature 1..21: note = Description of Artificial Sequence: Synthetic oligonucleotide
  source 1..21: mol_type = other RNA
  modified_base 1: mod_base = OTHER; note = 2'-O-methylguanosine-3'- phosphorothioate
  modified_base 2: mod_base = OTHER; note = 2'-O-methyladenosine-3'- phosphorothioate
  modified_base 3: mod_base = OTHER; note = 2'-O-methyladenosine-3'-phosphate
  modified_base 4: mod_base = OTHER; note = 2'-O-methylcytidine-3'-phosphate
  modified_base 5: mod_base = OTHER; note = 2'-O-methyladenosine-3'-phosphate
  modified_base 6: mod_base = OTHER; note = 2'-O-methyluridine-3'-phosphate
  modified_base 7: mod_base = OTHER; note = 2'-fluoroguanosine-3'-phosphate
  modified_base 8: mod_base = OTHER; note = 2'-O-methylcytidine-3'-phosphate
  modified_base 9: mod_base = OTHER; note = 2'-fluorocytidine-3'-phosphate
  modified_base 10: mod_base = OTHER; note = 2'-fluorouridine-3'-phosphate
  modified_base 11: mod_base = OTHER; note = 2'-fluoroadenosine-3'-phosphate
  modified_base 12: mod_base = OTHER; note = 2'-O-methylguanosine-3'-phosphate
  modified_base 13: mod_base = OTHER; note = 2'-O-methyluridine-3'-phosphate
  modified_base 14: mod_base = OTHER; note = 2'-O-methylcytidine-3'-phosphate
  modified_base 15: mod_base = OTHER; note = 2'-O-methylcytidine-3'-phosphate
  modified_base 16: mod_base = OTHER; note = 2'-O-methyladenosine-3'-phosphate
  modified_base 17: mod_base = OTHER; note = 2'-O-methyladenosine-3'-phosphate
  modified_base 18: mod_base = OTHER; note = 2'-O-methylcytidine-3'-phosphate
  modified_base 19: mod_base = OTHER; note = 2'-O-methyladenosine-3'-phosphate
  modified_base 20: mod_base = OTHER; note = 2'-O-methyluridine-3'-phosphate
  modified_base 21: mod_base = OTHER; note = 2'-O-methyluridine-3'-phosphate attached to N-[tris(N-acetylgalactosamine-alkyl)-amidodecanoyl)]-4-hydr oxyprolinol Hyp-(N-acetylgalactosamine-alkyl)3
gaacatgcctagtccaacatt

SEQ ID NO: 3620 - RNA, 21 nt, synthetic construct
  misc_feature 1..21: note = Description of Artificial Sequence: Synthetic oligonucleotide
  source 1..21: mol_type = other RNA
  modified_base 1: mod_base = OTHER; note = 2'-O-methyladenosine-3'- phosphorothioate
  modified_base 2: mod_base = OTHER; note = 2'-O-methyluridine-3'-phosphorothioate
  modified_base 3: mod_base = OTHER; note = 2'-O-methylcytidine-3'-phosphate
  modified_base 4: mod_base = OTHER; note = 2'-O-methyladenosine-3'-phosphate
  modified_base 5: mod_base = OTHER; note = 2'-O-methylguanosine-3'-phosphate
  modified_base 6: mod_base = OTHER; note = 2'-O-methyluridine-3'-phosphate
  modified_base 7: mod_base = OTHER; note = 2'-fluoroadenosine-3'-phosphate
  modified_base 8: mod_base = OTHER; note = 2'-O-methylguanosine-3'-phosphate
  modified_base 9: mod_base = OTHER; note = 2'-fluorouridine-3'-phosphate
  modified_base 10: mod_base = OTHER; note = 2'-fluoroguanosine-3'-phosphate
  modified_base 11: mod_base = OTHER; note = 2'-fluorouridine-3'-phosphate
  modified_base 12: mod_base = OTHER; note = 2'-O-methyladenosine-3'-phosphate
  modified_base 13: mod_base = OTHER; note = 2'-O-methylcytidine-3'-phosphate
  modified_base 14: mod_base = OTHER; note = 2'-O-methyladenosine-3'-phosphate
  modified_base 15: mod_base = OTHER; note = 2'-O-methyluridine-3'-phosphate
  modified_base 16: mod_base = OTHER; note = 2'-O-methyluridine-3'-phosphate
  modified_base 17: mod_base = OTHER; note = 2'-O-methyladenosine-3'-phosphate
  modified_base 18: mod_base = OTHER; note = 2'-O-methylcytidine-3'-phosphate
  modified_base 19: mod_base = OTHER; note = 2'-O-methylcytidine-3'-phosphate
  modified_base 20: mod_base = OTHER; note = 2'-O-methyladenosine-3'-phosphate
  modified_base 21: mod_base = OTHER; note = 2'-O-methyluridine-3'-phosphate attached to N-[tris(N-acetylgalactosamine-alkyl)-amidodecanoyl)]-4-hydr oxyprolinol Hyp-(N-acetylgalactosamine-alkyl)3
atcagtagtgtacattaccat

SEQ ID NO: 3621 - RNA, 21 nt, synthetic construct
  misc_feature 1..21: note = Description of Artificial Sequence: Synthetic oligonucleotide
  source 1..21: mol_type = other RNA
  modified_base 1: mod_base = OTHER; note = 2'-O-methyladenosine-3'- phosphorothioate
  modified_base 2: mod_base = OTHER; note = 2'-O-methyluridine-3'-phosphorothioate
  modified_base 3: mod_base = OTHER; note = 2'-O-methylcytidine-3'-phosphate
  modified_base 4: mod_base = OTHER; note = 2'-O-methylcytidine-3'-phosphate
  modified_base 5: mod_base = OTHER; note = 2'-O-methyladenosine-3'-phosphate
  modified_base 6: mod_base = OTHER; note = 2'-O-methyladenosine-3'-phosphate
  modified_base 7: mod_base = OTHER; note = 2'-fluoroguanosine-3'-phosphate
  modified_base 8: mod_base = OTHER; note = 2'-O-methyluridine-3'-phosphate
  modified_base 9: mod_base = OTHER; note = 2'-fluoroguanosine-3'-phosphate
  modified_base 10: mod_base = OTHER; note = 2'-fluorouridine-3'-phosphate
  modified_base 11: mod_base = OTHER; note = 2'-fluorouridine-3'-phosphate
  modified_base 12: mod_base = OTHER; note = 2'-O-methyladenosine-3'-phosphate
  modified_base 13: mod_base = OTHER; note = 2'-O-methyluridine-3'-phosphate
  modified_base 14: mod_base = OTHER; note = 2'-O-methyladenosine-3'-phosphate
  modified_base 15: mod_base = OTHER; note = 2'-O-methylcytidine-3'-phosphate
  modified_base 16: mod_base = OTHER; note = 2'-O-methylcytidine-3'-phosphate
  modified_base 17: mod_base = OTHER; note = 2'-O-methyladenosine-3'-phosphate
  modified_base 18: mod_base = OTHER; note = 2'-O-methyladenosine-3'-phosphate
  modified_base 19: mod_base = OTHER; note = 2'-O-methylcytidine-3'-phosphate
  modified_base 20: mod_base = OTHER; note = 2'-O-methyluridine-3'-phosphate
  modified_base 21: mod_base = OTHER; note = 2'-O-methyladenosine-3'-phosphate attached to N-[tris(N-acetylgalactosamine-alkyl)-amidodecanoyl)]-4-hydr oxyprolinol Hyp-(N-acetylgalactosamine-alkyl)3
atccaagtgttataccaacta

SEQ ID NO: 3622 - RNA, 21 nt, synthetic construct
  misc_feature 1..21: note = Description of Artificial Sequence: Synthetic oligonucleotide
  source 1..21: mol_type = other RNA
  modified_base 1: mod_base = OTHER; note = 2'-O-methylcytidine-3'- phosphorothioate
  modified_base 2: mod_base = OTHER; note = 2'-O-methylcytidine-3'- phosphorothioate
  modified_base 3: mod_base = OTHER; note = 2'-O-methyladenosine-3'-phosphate
  modified_base 4: mod_base = OTHER; note = 2'-O-methyladenosine-3'-phosphate
  modified_base 5: mod_base = OTHER; note = 2'-O-methylguanosine-3'-phosphate
  modified_base 6: mod_base = OTHER; note = 2'-O-methyluridine-3'-phosphate
  modified_base 7: mod_base = OTHER; note = 2'-fluorocytidine-3'-phosphate
  modified_base 8: mod_base = OTHER; note = 2'-O-methylcytidine-3'-phosphate
  modified_base 9: mod_base = OTHER; note = 2'-fluoroadenosine-3'-phosphate
  modified_base 10: mod_base = OTHER; note = 2'-fluoroadenosine-3'-phosphate
  modified_base 11: mod_base = OTHER; note = 2'-fluorouridine-3'-phosphate
  modified_base 12: mod_base = OTHER; note = 2'-O-methyladenosine-3'-phosphate
  modified_base 13: mod_base = OTHER; note = 2'-O-methyluridine-3'-phosphate
  modified_base 14: mod_base = OTHER; note = 2'-O-methylguanosine-3'-phosphate
  modified_base 15: mod_base = OTHER; note = 2'-O-methylguanosine-3'-phosphate
  modified_base 16: mod_base = OTHER; note = 2'-O-methylcytidine-3'-phosphate
  modified_base 17: mod_base = OTHER; note = 2'-O-methyladenosine-3'-phosphate
  modified_base 18: mod_base = OTHER; note = 2'-O-methyladenosine-3'-phosphate
  modified_base 19: mod_base = OTHER; note = 2'-O-methylcytidine-3'-phosphate
  modified_base 20: mod_base = OTHER; note = 2'-O-methyluridine-3'-phosphate
  modified_base 21: mod_base = OTHER; note = 2'-O-methyladenosine-3'-phosphate attached to N-[tris(N-acetylgalactosamine-alkyl)-amidodecanoyl)]-4-hydr oxyprolinol Hyp-(N-acetylgalactosamine-alkyl)3
ccaagtccaatatggcaacta

SEQ ID NO: 3623 - RNA, 21 nt, synthetic construct
  misc_feature 1..21: note = Description of Artificial Sequence: Synthetic oligonucleotide
  source 1..21: mol_type = other RNA
  modified_base 1: mod_base = OTHER; note = 2'-O-methyladenosine-3'- phosphorothioate
  modified_base 2: mod_base = OTHER; note = 2'-O-methyluridine-3'-phosphorothioate
  modified_base 3: mod_base = OTHER; note = 2'-O-methylcytidine-3'-phosphate
  modified_base 4: mod_base = OTHER; note = 2'-O-methyluridine-3'-phosphate
  modified_base 5: mod_base = OTHER; note = 2'-O-methylcytidine-3'-phosphate
  modified_base 6: mod_base = OTHER; note = 2'-O-methyladenosine-3'-phosphate
  modified_base 7: mod_base = OTHER; note = 2'-fluoroguanosine-3'-phosphate
  modified_base 8: mod_base = OTHER; note = 2'-O-methyladenosine-3'-phosphate
  modified_base 9: mod_base = OTHER; note = 2'-fluorocytidine-3'-phosphate
  modified_base 10: mod_base = OTHER; note = 2'-fluorocytidine-3'-phosphate
  modified_base 11: mod_base = OTHER; note = 2'-fluorouridine-3'-phosphate
  modified_base 12: mod_base = OTHER; note = 2'-O-methyluridine-3'-phosphate
  modified_base 13: mod_base = OTHER; note = 2'-O-methylguanosine-3'-phosphate
  modified_base 14: mod_base = OTHER; note = 2'-O-methyluridine-3'-phosphate
  modified_base 15: mod_base = OTHER; note = 2'-O-methylguanosine-3'-phosphate
  modified_base 16: mod_base = OTHER; note = 2'-O-methyladenosine-3'-phosphate
  modified_base 17: mod_base = OTHER; note = 2'-O-methyladenosine-3'-phosphate
  modified_base 18: mod_base = OTHER; note = 2'-O-methylguanosine-3'-phosphate
  modified_base 19: mod_base = OTHER; note = 2'-O-methylguanosine-3'-phosphate
  modified_base 20: mod_base = OTHER; note = 2'-O-methyluridine-3'-phosphate
  modified_base 21: mod_base = OTHER; note = 2'-O-methyladenosine-3'-phosphate attached to N-[tris(N-acetylgalactosamine-alkyl)-amidodecanoyl)]-4-hydr oxyprolinol Hyp-(N-acetylgalactosamine-alkyl)3
atctcagaccttgtgaaggta

SEQ ID NO: 3624 - RNA, 21 nt, synthetic construct
  misc_feature 1..21: note = Description of Artificial Sequence: Synthetic oligonucleotide
  source 1..21: mol_type = other RNA
  modified_base 1: mod_base = OTHER; note = 2'-O-methylcytidine-3'- phosphorothioate
  modified_base 2: mod_base = OTHER; note = 2'-O-methyladenosine-3'- phosphorothioate
  modified_base 3: mod_base = OTHER; note = 2'-O-methyluridine-3'-phosphate
  modified_base 4: mod_base = OTHER; note = 2'-O-methyluridine-3'-phosphate
  modified_base 5: mod_base = OTHER; note = 2'-O-methyluridine-3'-phosphate
  modified_base 6: mod_base = OTHER; note = 2'-O-methylcytidine-3'-phosphate
  modified_base 7: mod_base = OTHER; note = 2'-fluoroadenosine-3'-phosphate
  modified_base 8: mod_base = OTHER; note = 2'-O-methylcytidine-3'-phosphate
  modified_base 9: mod_base = OTHER; note = 2'-fluorouridine-3'-phosphate
  modified_base 10: mod_base = OTHER; note = 2'-fluoroguanosine-3'-phosphate
  modified_base 11: mod_base = OTHER; note = 2'-fluorouridine-3'-phosphate
  modified_base 12: mod_base = OTHER; note = 2'-O-methylcytidine-3'-phosphate
  modified_base 13: mod_base = OTHER; note = 2'-O-methyluridine-3'-phosphate
  modified_base 14: mod_base = OTHER; note = 2'-O-methyladenosine-3'-phosphate
  modified_base 15: mod_base = OTHER; note = 2'-O-methylguanosine-3'-phosphate
  modified_base 16: mod_base = OTHER; note = 2'-O-methylguanosine-3'-phosphate
  modified_base 17: mod_base = OTHER; note = 2'-O-methylcytidine-3'-phosphate
  modified_base 18: mod_base = OTHER; note = 2'-O-methyluridine-3'-phosphate
  modified_base 19: mod_base = OTHER; note = 2'-O-methyladenosine-3'-phosphate
  modified_base 20: mod_base = OTHER; note = 2'-O-methylcytidine-3'-phosphate
  modified_base 21: mod_base = OTHER; note = 2'-O-methyladenosine-3'-phosphate attached to N-[tris(N-acetylgalactosamine-alkyl)-amidodecanoyl)]-4-hydr oxyprolinol Hyp-(N-acetylgalactosamine-alkyl)3
catttcactgtctaggctaca

SEQ ID NO: 3625 - RNA, 21 nt, synthetic construct
  misc_feature 1..21: note = Description of Artificial Sequence: Synthetic oligonucleotide
  source 1..21: mol_type = other RNA
  modified_base 1: mod_base = OTHER; note = 2'-O-methylcytidine-3'- phosphorothioate
  modified_base 2: mod_base = OTHER; note = 2'-O-methylcytidine-3'- phosphorothioate
  modified_base 3: mod_base = OTHER; note = 2'-O-methyladenosine-3'-phosphate
  modified_base 4: mod_base = OTHER; note = 2'-O-methylcytidine-3'-phosphate
  modified_base 5: mod_base = OTHER; note = 2'-O-methyladenosine-3'-phosphate
  modified_base 6: mod_base = OTHER; note = 2'-O-methylguanosine-3'-phosphate
  modified_base 7: mod_base = OTHER; note = 2'-fluorocytidine-3'-phosphate
  modified_base 8: mod_base = OTHER; note = 2'-O-methyluridine-3'-phosphate
  modified_base 9: mod_base = OTHER; note = 2'-fluoroadenosine-3'-phosphate
  modified_base 10: mod_base = OTHER; note = 2'-fluorouridine-3'-phosphate
  modified_base 11: mod_base = OTHER; note = 2'-fluoroadenosine-3'-phosphate
  modified_base 12: mod_base = OTHER; note = 2'-O-methyluridine-3'-phosphate
  modified_base 13: mod_base = OTHER; note = 2'-O-methylcytidine-3'-phosphate
  modified_base 14: mod_base = OTHER; note = 2'-O-methylcytidine-3'-phosphate
  modified_base 15: mod_base = OTHER; note = 2'-O-methyluridine-3'-phosphate
  modified_base 16: mod_base = OTHER; note = 2'-O-methylguanosine-3'-phosphate
  modified_base 17: mod_base = OTHER; note = 2'-O-methyladenosine-3'-phosphate
  modified_base 18: mod_base = OTHER; note = 2'-O-methyluridine-3'-phosphate
  modified_base 19: mod_base = OTHER; note = 2'-O-methylguanosine-3'-phosphate
  modified_base 20: mod_base = OTHER; note = 2'-O-methylcytidine-3'-phosphate
  modified_base 21: mod_base = OTHER; note = 2'-O-methyluridine-3'-phosphate attached to N-[tris(N-acetylgalactosamine-alkyl)-amidodecanoyl)]-4-hydr oxyprolinol Hyp-(N-acetylgalactosamine-alkyl)3
ccacagctatatcctgatgct

SEQ ID NO: 3626 - RNA, 21 nt, synthetic construct
  misc_feature 1..21: note = Description of Artificial Sequence: Synthetic oligonucleotide
  source 1..21: mol_type = other RNA
  modified_base 1: mod_base = OTHER; note = 2'-O-methylcytidine-3'- phosphorothioate
  modified_base 2: mod_base = OTHER; note = 2'-O-methyluridine-3'-phosphorothioate
  modified_base 3: mod_base = OTHER; note = 2'-O-methyluridine-3'-phosphate
  modified_base 4: mod_base = OTHER; note = 2'-O-methylcytidine-3'-phosphate
  modified_base 5: mod_base = OTHER; note = 2'-O-methyladenosine-3'-phosphate
  modified_base 6: mod_base = OTHER; note = 2'-O-methylcytidine-3'-phosphate
  modified_base 7: mod_base = OTHER; note = 2'-fluorouridine-3'-phosphate
  modified_base 8: mod_base = OTHER; note = 2'-O-methylguanosine-3'-phosphate
  modified_base 9: mod_base = OTHER; note = 2'-fluoroadenosine-3'-phosphate
  modified_base 10: mod_base = OTHER; note = 2'-fluoroadenosine-3'-phosphate
  modified_base 11: mod_base = OTHER; note = 2'-fluorocytidine-3'-phosphate
  modified_base 12: mod_base = OTHER; note = 2'-O-methyladenosine-3'-phosphate
  modified_base 13: mod_base = OTHER; note = 2'-O-methyluridine-3'-phosphate
  modified_base 14: mod_base = OTHER; note = 2'-O-methylguanosine-3'-phosphate
  modified_base 15: mod_base = OTHER; note = 2'-O-methylcytidine-3'-phosphate
  modified_base 16: mod_base = OTHER; note = 2'-O-methylcytidine-3'-phosphate
  modified_base 17: mod_base = OTHER; note = 2'-O-methyluridine-3'-phosphate
  modified_base 18: mod_base = OTHER; note = 2'-O-methyladenosine-3'-phosphate
  modified_base 19: mod_base = OTHER; note = 2'-O-methylguanosine-3'-phosphate
  modified_base 20: mod_base = OTHER; note = 2'-O-methyluridine-3'-phosphate
  modified_base 21: mod_base = OTHER; note = 2'-O-methyladenosine-3'-phosphate attached to N-[tris(N-acetylgalactosamine-alkyl)-amidodecanoyl)]-4-hydr oxyprolinol Hyp-(N-acetylgalactosamine-alkyl)3
cttcactgaacatgcctagta

SEQ ID NO: 3627 - RNA, 21 nt, synthetic construct
  misc_feature 1..21: note = Description of Artificial Sequence: Synthetic oligonucleotide
  source 1..21: mol_type = other RNA
  modified_base 1: mod_base = OTHER; note = 2'-O-methylguanosine-3'- phosphorothioate
  modified_base 2: mod_base = OTHER; note = 2'-O-methyluridine-3'-phosphorothioate
  modified_base 3: mod_base = OTHER; note = 2'-O-methylguanosine-3'-phosphate
  modified_base 4: mod_base = OTHER; note = 2'-O-methylguanosine-3'-phosphate
  modified_base 5: mod_base = OTHER; note = 2'-O-methyluridine-3'-phosphate
  modified_base 6: mod_base = OTHER; note = 2'-O-methyluridine-3'-phosphate
  modified_base 7: mod_base = OTHER; note = 2'-fluoroguanosine-3'-phosphate
  modified_base 8: mod_base = OTHER; note = 2'-O-methyladenosine-3'-phosphate
  modified_base 9: mod_base = OTHER; note = 2'-fluoroguanosine-3'-phosphate
  modified_base 10: mod_base = OTHER; note = 2'-fluoroadenosine-3'-phosphate
  modified_base 11: mod_base = OTHER; note = 2'-fluoroguanosine-3'-phosphate
  modified_base 12: mod_base = OTHER; note = 2'-O-methyluridine-3'-phosphate
  modified_base 13: mod_base = OTHER; note = 2'-O-methylguanosine-3'-phosphate
  modified_base 14: mod_base = OTHER; note = 2'-O-methylcytidine-3'-phosphate
  modified_base 15: mod_base = OTHER; note = 2'-O-methyluridine-3'-phosphate
  modified_base 16: mod_base = OTHER; note = 2'-O-methyluridine-3'-phosphate
  modified_base 17: mod_base = OTHER; note = 2'-O-methyladenosine-3'-phosphate
  modified_base 18: mod_base = OTHER; note = 2'-O-methyluridine-3'-phosphate
  modified_base 19: mod_base = OTHER; note = 2'-O-methylguanosine-3'-phosphate
  modified_base 20: mod_base = OTHER; note = 2'-O-methyladenosine-3'-phosphate
  modified_base 21: mod_base = OTHER; note = 2'-O-methyladenosine-3'-phosphate attached to N-[tris(N-acetylgalactosamine-alkyl)-amidodecanoyl)]-4-hydr oxyprolinol Hyp-(N-acetylgalactosamine-alkyl)3
gtggttgagagtgcttatgaa

SEQ ID NO: 3628 - RNA, 21 nt, synthetic construct
  misc_feature 1..21: note = Description of Artificial Sequence: Synthetic oligonucleotide
  source 1..21: mol_type = other RNA
  modified_base 1: mod_base = OTHER; note = 2'-O-methylcytidine-3'- phosphorothioate
  modified_base 2: mod_base = OTHER; note = 2'-O-methyladenosine-3'- phosphorothioate
  modified_base 3: mod_base = OTHER; note = 2'-O-methyladenosine-3'-phosphate
  modified_base 4: mod_base = OTHER; note = 2'-O-methyladenosine-3'-phosphate
  modified_base 5: mod_base = OTHER; note = 2'-O-methylcytidine-3'-phosphate
  modified_base 6: mod_base = OTHER; note = 2'-O-methyluridine-3'-phosphate
  modified_base 7: mod_base = OTHER; note = 2'-fluorocytidine-3'-phosphate
  modified_base 8: mod_base = OTHER; note = 2'-O-methyladenosine-3'-phosphate
  modified_base 9: mod_base = OTHER; note = 2'-fluoroadenosine-3'-phosphate
  modified_base 10: mod_base = OTHER; note = 2'-fluoroadenosine-3'-phosphate
  modified_base 11: mod_base = OTHER; note = 2'-fluoroguanosine-3'-phosphate
  modified_base 12: mod_base = OTHER; note = 2'-O-methylguanosine-3'-phosphate
  modified_base 13: mod_base = OTHER; note = 2'-O-methylcytidine-3'-phosphate
  modified_base 14: mod_base = OTHER; note = 2'-O-methyluridine-3'-phosphate
  modified_base 15: mod_base = OTHER; note = 2'-O-methyladenosine-3'-phosphate
  modified_base 16: mod_base = OTHER; note = 2'-O-methylcytidine-3'-phosphate
  modified_base 17: mod_base = OTHER; note = 2'-O-methyladenosine-3'-phosphate
  modified_base 18: mod_base = OTHER; note = 2'-O-methylcytidine-3'-phosphate
  modified_base 19: mod_base = OTHER; note = 2'-O-methyladenosine-3'-phosphate
  modified_base 20: mod_base = OTHER; note = 2'-O-methyluridine-3'-phosphate
  modified_base 21: mod_base = OTHER; note = 2'-O-methyladenosine-3'-phosphate attached to N-[tris(N-acetylgalactosamine-alkyl)-amidodecanoyl)]-4-hydr oxyprolinol Hyp-(N-acetylgalactosamine-alkyl)3
caaactcaaaggctacacata

SEQ ID NO: 3629 - RNA, 21 nt, synthetic construct
  misc_feature 1..21: note = Description of Artificial Sequence: Synthetic oligonucleotide
  source 1..21: mol_type = other RNA
  modified_base 1: mod_base = OTHER; note = 2'-O-methyladenosine-3'- phosphorothioate
  modified_base 2: mod_base = OTHER; note = 2'-O-methyluridine-3'-phosphorothioate
  modified_base 3: mod_base = OTHER; note = 2'-O-methyladenosine-3'-phosphate
  modified_base 4: mod_base = OTHER; note = 2'-O-methyluridine-3'-phosphate
  modified_base 5: mod_base = OTHER; note = 2'-O-methylcytidine-3'-phosphate
  modified_base 6: mod_base = OTHER; note = 2'-O-methyladenosine-3'-phosphate
  modified_base 7: mod_base = OTHER; note = 2'-fluoroguanosine-3'-phosphate
  modified_base 8: mod_base = OTHER; note = 2'-O-methyluridine-3'-phosphate
  modified_base 9: mod_base = OTHER; note = 2'-fluoroadenosine-3'-phosphate
  modified_base 10: mod_base = OTHER; note = 2'-fluoroguanosine-3'-phosphate
  modified_base 11: mod_base = OTHER; note = 2'-fluorouridine-3'-phosphate
  modified_base 12: mod_base = OTHER; note = 2'-O-methylguanosine-3'-phosphate
  modified_base 13: mod_base = OTHER; note = 2'-O-methyluridine-3'-phosphate
  modified_base 14: mod_base = OTHER; note = 2'-O-methyladenosine-3'-phosphate
  modified_base 15: mod_base = OTHER; note = 2'-O-methylcytidine-3'-phosphate
  modified_base 16: mod_base = OTHER; note = 2'-O-methyladenosine-3'-phosphate
  modified_base 17: mod_base = OTHER; note = 2'-O-methyluridine-3'-phosphate
  modified_base 18: mod_base = OTHER; note = 2'-O-methyluridine-3'-phosphate
  modified_base 19: mod_base = OTHER; note = 2'-O-methyladenosine-3'-phosphate
  modified_base 20: mod_base = OTHER; note = 2'-O-methylcytidine-3'-phosphate
  modified_base 21: mod_base = OTHER; note = 2'-O-methyladenosine-3'-phosphate attached to N-[tris(N-acetylgalactosamine-alkyl)-amidodecanoyl)]-4-hydr oxyprolinol Hyp-(N-acetylgalactosamine-alkyl)3
atatcagtagtgtacattaca

SEQ ID NO: 3630 - RNA, 21 nt, synthetic construct
  misc_feature 1..21: note = Description of Artificial Sequence: Synthetic oligonucleotide
  source 1..21: mol_type = other RNA
  modified_base 1: mod_base = OTHER; note = 2'-O-methylcytidine-3'- phosphorothioate
  modified_base 2: mod_base = OTHER; note = 2'-O-methyladenosine-3'- phosphorothioate
  modified_base 3: mod_base = OTHER; note = 2'-O-methyladenosine-3'-phosphate
  modified_base 4: mod_base = OTHER; note = 2'-O-methylcytidine-3'-phosphate
  modified_base 5: mod_base = OTHER; note = 2'-O-methylcytidine-3'-phosphate
  modified_base 6: mod_base = OTHER; note = 2'-O-methyladenosine-3'-phosphate
  modified_base 7: mod_base = OTHER; note = 2'-fluoroadenosine-3'-phosphate
  modified_base 8: mod_base = OTHER; note = 2'-O-methylcytidine-3'-phosphate
  modified_base 9: mod_base = OTHER; note = 2'-fluorouridine-3'-phosphate
  modified_base 10: mod_base = OTHER; note = 2'-fluoroadenosine-3'-phosphate
  modified_base 11: mod_base = OTHER; note = 2'-fluorouridine-3'-phosphate
  modified_base 12: mod_base = OTHER; note = 2'-O-methylcytidine-3'-phosphate
  modified_base 13: mod_base = OTHER; note = 2'-O-methylcytidine-3'-phosphate
  modified_base 14: mod_base = OTHER; note = 2'-O-methyladenosine-3'-phosphate
  modified_base 15: mod_base = OTHER; note = 2'-O-methyladenosine-3'-phosphate
  modified_base 16: mod_base = OTHER; note = 2'-O-methylguanosine-3'-phosphate
  modified_base 17: mod_base = OTHER; note = 2'-O-methyluridine-3'-phosphate
  modified_base 18: mod_base = OTHER; note = 2'-O-methylguanosine-3'-phosphate
  modified_base 19: mod_base = OTHER; note = 2'-O-methyluridine-3'-phosphate
  modified_base 20: mod_base = OTHER; note = 2'-O-methyluridine-3'-phosphate
  modified_base 21: mod_base = OTHER; note = 2'-O-methyladenosine-3'-phosphate attached to N-[tris(N-acetylgalactosamine-alkyl)-amidodecanoyl)]-4-hydr oxyprolinol Hyp-(N-acetylgalactosamine-alkyl)3
caaccaactatccaagtgtta

SEQ ID NO: 3631 - RNA, 21 nt, synthetic construct
  misc_feature 1..21: note = Description of Artificial Sequence: Synthetic oligonucleotide
  source 1..21: mol_type = other RNA
  modified_base 1: mod_base = OTHER; note = 2'-O-methyluridine-3'-phosphorothioate
  modified_base 2: mod_base = OTHER; note = 2'-O-methylcytidine-3'- phosphorothioate
  modified_base 3: mod_base = OTHER; note = 2'-O-methyladenosine-3'-phosphate
  modified_base 4: mod_base = OTHER; note = 2'-O-methyluridine-3'-phosphate
  modified_base 5: mod_base = OTHER; note = 2'-O-methylcytidine-3'-phosphate
  modified_base 6: mod_base = OTHER; note = 2'-O-methylguanosine-3'-phosphate
  modified_base 7: mod_base = OTHER; note = 2'-fluoroadenosine-3'-phosphate
  modified_base 8: mod_base = OTHER; note = 2'-O-methyladenosine-3'-phosphate
  modified_base 9: mod_base = OTHER; note = 2'-fluoroguanosine-3'-phosphate
  modified_base 10: mod_base = OTHER; note = 2'-fluoroadenosine-3'-phosphate
  modified_base 11: mod_base = OTHER; note = 2'-fluorocytidine-3'-phosphate
  modified_base 12: mod_base = OTHER; note = 2'-O-methyladenosine-3'-phosphate
  modified_base 13: mod_base = OTHER; note = 2'-O-methyladenosine-3'-phosphate
  modified_base 14: mod_base = OTHER; note = 2'-O-methyladenosine-3'-phosphate
  modified_base 15: mod_base = OTHER; note = 2'-O-methyluridine-3'-phosphate
  modified_base 16: mod_base = OTHER; note = 2'-O-methyluridine-3'-phosphate
  modified_base 17: mod_base = OTHER; note = 2'-O-methylguanosine-3'-phosphate
  modified_base 18: mod_base = OTHER; note = 2'-O-methyladenosine-3'-phosphate
  modified_base 19: mod_base = OTHER; note = 2'-O-methyladenosine-3'-phosphate
  modified_base 20: mod_base = OTHER; note = 2'-O-methylguanosine-3'-phosphate
  modified_base 21: mod_base = OTHER; note = 2'-O-methyladenosine-3'-phosphate attached to N-[tris(N-acetylgalactosamine-alkyl)-amidodecanoyl)]-4-hydr oxyprolinol Hyp-(N-acetylgalactosamine-alkyl)3
tcatcgaagacaaattgaaga

SEQ ID NO: 3632 - RNA, 21 nt, synthetic construct
  misc_feature 1..21: note = Description of Artificial Sequence: Synthetic oligonucleotide
  source 1..21: mol_type = other RNA
  modified_base 1: mod_base = OTHER; note = 2'-O-methylguanosine-3'- phosphorothioate
  modified_base 2: mod_base = OTHER; note = 2'-O-methylcytidine-3'- phosphorothioate
  modified_base 3: mod_base = OTHER; note = 2'-O-methyladenosine-3'-phosphate
  modified_base 4: mod_base = OTHER; note = 2'-O-methylguanosine-3'-phosphate
  modified_base 5: mod_base = OTHER; note = 2'-O-methyladenosine-3'-phosphate
  modified_base 6: mod_base = OTHER; note = 2'-O-methyluridine-3'-phosphate
  modified_base 7: mod_base = OTHER; note = 2'-fluorouridine-3'-phosphate
  modified_base 8: mod_base = OTHER; note = 2'-O-methyluridine-3'-phosphate
  modified_base 9: mod_base = OTHER; note = 2'-fluoroguanosine-3'-phosphate
  modified_base 10: mod_base = OTHER; note = 2'-fluoroguanosine-3'-phosphate
  modified_base 11: mod_base = OTHER; note = 2'-fluorocytidine-3'-phosphate
  modified_base 12: mod_base = OTHER; note = 2'-O-methyladenosine-3'-phosphate
  modified_base 13: mod_base = OTHER; note = 2'-O-methylguanosine-3'-phosphate
  modified_base 14: mod_base = OTHER; note = 2'-O-methyladenosine-3'-phosphate
  modified_base 15: mod_base = OTHER; note = 2'-O-methylguanosine-3'-phosphate
  modified_base 16: mod_base = OTHER; note = 2'-O-methyladenosine-3'-phosphate
  modified_base 17: mod_base = OTHER; note = 2'-O-methylguanosine-3'-phosphate
  modified_base 18: mod_base = OTHER; note = 2'-O-methyluridine-3'-phosphate
  modified_base 19: mod_base = OTHER; note = 2'-O-methyladenosine-3'-phosphate
  modified_base 20: mod_base = OTHER; note = 2'-O-methyluridine-3'-phosphate
  modified_base 21: mod_base = OTHER; note = 2'-O-methyladenosine-3'-phosphate attached to N-[tris(N-acetylgalactosamine-alkyl)-amidodecanoyl)]-4-hydr oxyprolinol Hyp-(N-acetylgalactosamine-alkyl)3
gcagatttggcagagagtata

SEQ ID NO: 3633 - RNA, 21 nt, synthetic construct
  misc_feature 1..21: note = Description of Artificial Sequence: Synthetic oligonucleotide
  source 1..21: mol_type = other RNA
  modified_base 1: mod_base = OTHER; note = 2'-O-methylcytidine-3'- phosphorothioate
  modified_base 2: mod_base = OTHER; note = 2'-O-methyluridine-3'-phosphorothioate
  modified_base 3: mod_base = OTHER; note = 2'-O-methylcytidine-3'-phosphate
  modified_base 4: mod_base = OTHER; note = 2'-O-methylcytidine-3'-phosphate
  modified_base 5: mod_base = OTHER; note = 2'-O-methyluridine-3'-phosphate
  modified_base 6: mod_base = OTHER; note = 2'-O-methyluridine-3'-phosphate
  modified_base 7: mod_base = OTHER; note = 2'-fluorocytidine-3'-phosphate
  modified_base 8: mod_base = OTHER; note = 2'-O-methyladenosine-3'-phosphate
  modified_base 9: mod_base = OTHER; note = 2'-fluorocytidine-3'-phosphate
  modified_base 10: mod_base = OTHER; note = 2'-fluorouridine-3'-phosphate
  modified_base 11: mod_base = OTHER; note = 2'-fluoroguanosine-3'-phosphate
  modified_base 12: mod_base = OTHER; note = 2'-O-methyladenosine-3'-phosphate
  modified_base 13: mod_base = OTHER; note = 2'-O-methyladenosine-3'-phosphate
  modified_base 14: mod_base = OTHER; note = 2'-O-methylcytidine-3'-phosphate
  modified_base 15: mod_base = OTHER; note = 2'-O-methyladenosine-3'-phosphate
  modified_base 16: mod_base = OTHER; note = 2'-O-methyluridine-3'-phosphate
  modified_base 17: mod_base = OTHER; note = 2'-O-methylguanosine-3'-phosphate
  modified_base 18: mod_base = OTHER; note = 2'-O-methylcytidine-3'-phosphate
  modified_base 19: mod_base = OTHER; note = 2'-O-methylcytidine-3'-phosphate
  modified_base 20: mod_base = OTHER; note = 2'-O-methyluridine-3'-phosphate
  modified_base 21: mod_base = OTHER; note = 2'-O-methyladenosine-3'-phosphate attached to N-[tris(N-acetylgalactosamine-alkyl)-amidodecanoyl)]-4-hydr oxyprolinol Hyp-(N-acetylgalactosamine-alkyl)3
ctccttcactgaacatgccta

SEQ ID NO: 3634 - RNA, 21 nt, synthetic construct
  misc_feature 1..21: note = Description of Artificial Sequence: Synthetic oligonucleotide
  source 1..21: mol_type = other RNA
  modified_base 1: mod_base = OTHER; note = 2'-O-methylcytidine-3'- phosphorothioate
  modified_base 2: mod_base = OTHER; note = 2'-O-methyladenosine-3'- phosphorothioate
  modified_base 3: mod_base = OTHER; note = 2'-O-methyluridine-3'-phosphate
  modified_base 4: mod_base = OTHER; note = 2'-O-methylguanosine-3'-phosphate
  modified_base 5: mod_base = OTHER; note = 2'-O-methylcytidine-3'-phosphate
  modified_base 6: mod_base = OTHER; note = 2'-O-methylcytidine-3'-phosphate
  modified_base 7: mod_base = OTHER; note = 2'-fluorouridine-3'-phosphate
  modified_base 8: mod_base = OTHER; note = 2'-O-methyladenosine-3'-phosphate
  modified_base 9: mod_base = OTHER; note = 2'-fluoroguanosine-3'-phosphate
  modified_base 10: mod_base = OTHER; note = 2'-fluorouridine-3'-phosphate
  modified_base 11: mod_base = OTHER; note = 2'-fluorocytidine-3'-phosphate
  modified_base 12: mod_base = OTHER; note = 2'-O-methylcytidine-3'-phosphate
  modified_base 13: mod_base = OTHER; note = 2'-O-methyladenosine-3'-phosphate
  modified_base 14: mod_base = OTHER; note = 2'-O-methyladenosine-3'-phosphate
  modified_base 15: mod_base = OTHER; note = 2'-O-methylcytidine-3'-phosphate
  modified_base 16: mod_base = OTHER; note = 2'-O-methyladenosine-3'-phosphate
  modified_base 17: mod_base = OTHER; note = 2'-O-methyluridine-3'-phosphate
  modified_base 18: mod_base = OTHER; note = 2'-O-methyluridine-3'-phosphate
  modified_base 19: mod_base = OTHER; note = 2'-O-methyluridine-3'-phosphate
  modified_base 20: mod_base = OTHER; note = 2'-O-methyluridine-3'-phosphate
  modified_base 21: mod_base = OTHER; note = 2'-O-methyluridine-3'-phosphate attached to N-[tris(N-acetylgalactosamine-alkyl)-amidodecanoyl)]-4-hydr oxyprolinol Hyp-(N-acetylgalactosamine-alkyl)3
catgcctagtccaacattttt

SEQ ID NO: 3635 - RNA, 21 nt, synthetic construct
  misc_feature 1..21: note = Description of Artificial Sequence: Synthetic oligonucleotide
  source 1..21: mol_type = other RNA
  modified_base 1: mod_base = OTHER; note = 2'-O-methyluridine-3'-phosphorothioate
  modified_base 2: mod_base = OTHER; note = 2'-O-methylguanosine-3'- phosphorothioate
  modified_base 3: mod_base = OTHER; note = 2'-O-methylcytidine-3'-phosphate
  modified_base 4: mod_base = OTHER; note = 2'-O-methylcytidine-3'-phosphate
  modified_base 5: mod_base = OTHER; note = 2'-O-methyladenosine-3'-phosphate
  modified_base 6: mod_base = OTHER; note = 2'-O-methyluridine-3'-phosphate
  modified_base 7: mod_base = OTHER; note = 2'-fluorocytidine-3'-phosphate
  modified_base 8: mod_base = OTHER; note = 2'-O-methyladenosine-3'-phosphate
  modified_base 9: mod_base = OTHER; note = 2'-fluoroguanosine-3'-phosphate
  modified_base 10: mod_base = OTHER; note = 2'-fluorouridine-3'-phosphate
  modified_base 11: mod_base = OTHER; note = 2'-fluoroadenosine-3'-phosphate
  modified_base 12: mod_base = OTHER; note = 2'-O-methyluridine-3'-phosphate
  modified_base 13: mod_base = OTHER; note = 2'-O-methylcytidine-3'-phosphate
  modified_base 14: mod_base = OTHER; note = 2'-O-methyluridine-3'-phosphate
  modified_base 15: mod_base = OTHER; note = 2'-O-methyluridine-3'-phosphate
  modified_base 16: mod_base = OTHER; note = 2'-O-methyladenosine-3'-phosphate
  modified_base 17: mod_base = OTHER; note = 2'-O-methyladenosine-3'-phosphate
  modified_base 18: mod_base = OTHER; note = 2'-O-methyluridine-3'-phosphate
  modified_base 19: mod_base = OTHER; note = 2'-O-methylguanosine-3'-phosphate
  modified_base 20: mod_base = OTHER; note = 2'-O-methyladenosine-3'-phosphate
  modified_base 21: mod_base = OTHER; note = 2'-O-methyladenosine-3'-phosphate attached to N-[tris(N-acetylgalactosamine-alkyl)-amidodecanoyl)]-4-hydr oxyprolinol Hyp-(N-acetylgalactosamine-alkyl)3
tgccatcagtatcttaatgaa

SEQ ID NO: 3636 - RNA, 21 nt, synthetic construct
  misc_feature 1..21: note = Description of Artificial Sequence: Synthetic oligonucleotide
  source 1..21: mol_type = other RNA
  modified_base 1: mod_base = OTHER; note = 2'-O-methylguanosine-3'- phosphorothioate
  modified_base 2: mod_base = OTHER; note = 2'-O-methylcytidine-3'- phosphorothioate
  modified_base 3: mod_base = OTHER; note = 2'-O-methylcytidine-3'-phosphate
  modified_base 4: mod_base = OTHER; note = 2'-O-methyladenosine-3'-phosphate
  modified_base 5: mod_base = OTHER; note = 2'-O-methyluridine-3'-phosphate
  modified_base 6: mod_base = OTHER; note = 2'-O-methylcytidine-3'-phosphate
  modified_base 7: mod_base = OTHER; note = 2'-fluoroadenosine-3'-phosphate
  modified_base 8: mod_base = OTHER; note = 2'-O-methylguanosine-3'-phosphate
  modified_base 9: mod_base = OTHER; note = 2'-fluorouridine-3'-phosphate
  modified_base 10: mod_base = OTHER; note = 2'-fluoroadenosine-3'-phosphate
  modified_base 11: mod_base = OTHER; note = 2'-fluorouridine-3'-phosphate
  modified_base 12: mod_base = OTHER; note = 2'-O-methylcytidine-3'-phosphate
  modified_base 13: mod_base = OTHER; note = 2'-O-methyluridine-3'-phosphate
  modified_base 14: mod_base = OTHER; note = 2'-O-methyluridine-3'-phosphate
  modified_base 15: mod_base = OTHER; note = 2'-O-methyladenosine-3'-phosphate
  modified_base 16: mod_base = OTHER; note = 2'-O-methyladenosine-3'-phosphate
  modified_base 17: mod_base = OTHER; note = 2'-O-methyluridine-3'-phosphate
  modified_base 18: mod_base = OTHER; note = 2'-O-methylguanosine-3'-phosphate
  modified_base 19: mod_base = OTHER; note = 2'-O-methyladenosine-3'-phosphate
  modified_base 20: mod_base = OTHER; note = 2'-O-methyladenosine-3'-phosphate
  modified_base 21: mod_base = OTHER; note = 2'-O-methyladenosine-3'-phosphate attached to N-[tris(N-acetylgalactosamine-alkyl)-amidodecanoyl)]-4-hydr oxyprolinol Hyp-(N-acetylgalactosamine-alkyl)3
gccatcagtatcttaatgaaa

SEQ ID NO: 3637 - RNA, 21 nt, synthetic construct
  misc_feature 1..21: note = Description of Artificial Sequence: Synthetic oligonucleotide
  source 1..21: mol_type = other RNA
  modified_base 1: mod_base = OTHER; note = 2'-O-methyluridine-3'-phosphorothioate
  modified_base 2: mod_base = OTHER; note = 2'-O-methyluridine-3'-phosphorothioate
  modified_base 3: mod_base = OTHER; note = 2'-O-methyladenosine-3'-phosphate
  modified_base 4: mod_base = OTHER; note = 2'-O-methylguanosine-3'-phosphate
  modified_base 5: mod_base = OTHER; note = 2'-O-methyladenosine-3'-phosphate
  modified_base 6: mod_base = OTHER; note = 2'-O-methyladenosine-3'-phosphate
  modified_base 7: mod_base = OTHER; note = 2'-fluorocytidine-3'-phosphate
  modified_base 8: mod_base = OTHER; note = 2'-O-methyladenosine-3'-phosphate
  modified_base 9: mod_base = OTHER; note = 2'-fluorocytidine-3'-phosphate
  modified_base 10: mod_base = OTHER; note = 2'-fluorocytidine-3'-phosphate
  modified_base 11: mod_base = OTHER; note = 2'-fluoroadenosine-3'-phosphate
  modified_base 12: mod_base = OTHER; note = 2'-O-methyladenosine-3'-phosphate
  modified_base 13: mod_base = OTHER; note = 2'-O-methyladenosine-3'-phosphate
  modified_base 14: mod_base = OTHER; note = 2'-O-methylguanosine-3'-phosphate
  modified_base 15: mod_base = OTHER; note = 2'-O-methyladenosine-3'-phosphate
  modified_base 16: mod_base = OTHER; note = 2'-O-methyluridine-3'-phosphate
  modified_base 17: mod_base = OTHER; note = 2'-O-methyluridine-3'-phosphate
  modified_base 18: mod_base = OTHER; note = 2'-O-methylguanosine-3'-phosphate
  modified_base 19: mod_base = OTHER; note = 2'-O-methyluridine-3'-phosphate
  modified_base 20: mod_base = OTHER; note = 2'-O-methylcytidine-3'-phosphate
  modified_base 21: mod_base = OTHER; note = 2'-O-methyluridine-3'-phosphate attached to N-[tris(N-acetylgalactosamine-alkyl)-amidodecanoyl)]-4-hydr oxyprolinol Hyp-(N-acetylgalactosamine-alkyl)3
ttagaacaccaaagattgtct

SEQ ID NO: 3638 - RNA, 21 nt, synthetic construct
  misc_feature 1..21: note = Description of Artificial Sequence: Synthetic oligonucleotide
  source 1..21: mol_type = other RNA
  modified_base 1: mod_base = OTHER; note = 2'-O-methyladenosine-3'- phosphorothioate
  modified_base 2: mod_base = OTHER; note = 2'-O-methyluridine-3'-phosphorothioate
  modified_base 3: mod_base = OTHER; note = 2'-O-methylcytidine-3'-phosphate
  modified_base 4: mod_base = OTHER; note = 2'-O-methyladenosine-3'-phosphate
  modified_base 5: mod_base = OTHER; note = 2'-O-methyluridine-3'-phosphate
  modified_base 6: mod_base = OTHER; note = 2'-O-methyluridine-3'-phosphate
  modified_base 7: mod_base = OTHER; note = 2'-fluorouridine-3'-phosphate
  modified_base 8: mod_base = OTHER; note = 2'-O-methylcytidine-3'-phosphate
  modified_base 9: mod_base = OTHER; note = 2'-fluoroadenosine-3'-phosphate
  modified_base 10: mod_base = OTHER; note = 2'-fluorocytidine-3'-phosphate
  modified_base 11: mod_base = OTHER; note = 2'-fluorouridine-3'-phosphate
  modified_base 12: mod_base = OTHER; note = 2'-O-methylguanosine-3'-phosphate
  modified_base 13: mod_base = OTHER; note = 2'-O-methyluridine-3'-phosphate
  modified_base 14: mod_base = OTHER; note = 2'-O-methylcytidine-3'-phosphate
  modified_base 15: mod_base = OTHER; note = 2'-O-methyluridine-3'-phosphate
  modified_base 16: mod_base = OTHER; note = 2'-O-methyladenosine-3'-phosphate
  modified_base 17: mod_base = OTHER; note = 2'-O-methylguanosine-3'-phosphate
  modified_base 18: mod_base = OTHER; note = 2'-O-methylguanosine-3'-phosphate
  modified_base 19: mod_base = OTHER; note = 2'-O-methylcytidine-3'-phosphate
  modified_base 20: mod_base = OTHER; note = 2'-O-methyluridine-3'-phosphate
  modified_base 21: mod_base = OTHER; note = 2'-O-methyladenosine-3'-phosphate attached to N-[tris(N-acetylgalactosamine-alkyl)-amidodecanoyl)]-4-hydr oxyprolinol Hyp-(N-acetylgalactosamine-alkyl)3
atcatttcactgtctaggcta

SEQ ID NO: 3639 - RNA, 21 nt, synthetic construct
  misc_feature 1..21: note = Description of Artificial Sequence: Synthetic oligonucleotide
  source 1..21: mol_type = other RNA
  modified_base 1: mod_base = OTHER; note = 2'-O-methyluridine-3'-phosphorothioate
  modified_base 2: mod_base = OTHER; note = 2'-O-methylcytidine-3'- phosphorothioate
  modified_base 3: mod_base = OTHER; note = 2'-O-methyladenosine-3'-phosphate
  modified_base 4: mod_base = OTHER; note = 2'-O-methylcytidine-3'-phosphate
  modified_base 5: mod_base = OTHER; note = 2'-O-methyluridine-3'-phosphate
  modified_base 6: mod_base = OTHER; note = 2'-O-methylguanosine-3'-phosphate
  modified_base 7: mod_base = OTHER; note = 2'-fluorouridine-3'-phosphate
  modified_base 8: mod_base = OTHER; note = 2'-O-methylcytidine-3'-phosphate
  modified_base 9: mod_base = OTHER; note = 2'-fluorouridine-3'-phosphate
  modified_base 10: mod_base = OTHER; note = 2'-fluoroadenosine-3'-phosphate
  modified_base 11: mod_base = OTHER; note = 2'-fluoroguanosine-3'-phosphate
  modified_base 12: mod_base = OTHER; note = 2'-O-methylguanosine-3'-phosphate
  modified_base 13: mod_base = OTHER; note = 2'-O-methylcytidine-3'-phosphate
  modified_base 14: mod_base = OTHER; note = 2'-O-methyluridine-3'-phosphate
  modified_base 15: mod_base = OTHER; note = 2'-O-methyladenosine-3'-phosphate
  modified_base 16: mod_base = OTHER; note = 2'-O-methylcytidine-3'-phosphate
  modified_base 17: mod_base = OTHER; note = 2'-O-methyladenosine-3'-phosphate
  modified_base 18: mod_base = OTHER; note = 2'-O-methyladenosine-3'-phosphate
  modified_base 19: mod_base = OTHER; note = 2'-O-methylcytidine-3'-phosphate
  modified_base 20: mod_base = OTHER; note = 2'-O-methyladenosine-3'-phosphate
  modified_base 21: mod_base = OTHER; note = 2'-O-methyladenosine-3'-phosphate attached to N-[tris(N-acetylgalactosamine-alkyl)-amidodecanoyl)]-4-hydr oxyprolinol Hyp-(N-acetylgalactosamine-alkyl)3
tcactgtctaggctacaacaa

SEQ ID NO: 3640 - RNA, 21 nt, synthetic construct
  misc_feature 1..21: note = Description of Artificial Sequence: Synthetic oligonucleotide
  source 1..21: mol_type = other RNA
  modified_base 1: mod_base = OTHER; note = 2'-O-methylguanosine-3'- phosphorothioate
  modified_base 2: mod_base = OTHER; note = 2'-O-methylguanosine-3'- phosphorothioate
  modified_base 3: mod_base = OTHER; note = 2'-O-methyladenosine-3'-phosphate
  modified_base 4: mod_base = OTHER; note = 2'-O-methyluridine-3'-phosphate
  modified_base 5: mod_base = OTHER; note = 2'-O-methylcytidine-3'-phosphate
  modified_base 6: mod_base = OTHER; note = 2'-O-methylcytidine-3'-phosphate
  modified_base 7: mod_base = OTHER; note = 2'-fluoroadenosine-3'-phosphate
  modified_base 8: mod_base = OTHER; note = 2'-O-methylguanosine-3'-phosphate
  modified_base 9: mod_base = OTHER; note = 2'-fluorouridine-3'-phosphate
  modified_base 10: mod_base = OTHER; note = 2'-fluoroguanosine-3'-phosphate
  modified_base 11: mod_base = OTHER; note = 2'-fluorouridine-3'-phosphate
  modified_base 12: mod_base = OTHER; note = 2'-O-methyladenosine-3'-phosphate
  modified_base 13: mod_base = OTHER; note = 2'-O-methyluridine-3'-phosphate
  modified_base 14: mod_base = OTHER; note = 2'-O-methyladenosine-3'-phosphate
  modified_base 15: mod_base = OTHER; note = 2'-O-methyladenosine-3'-phosphate
  modified_base 16: mod_base = OTHER; note = 2'-O-methyladenosine-3'-phosphate
  modified_base 17: mod_base = OTHER; note = 2'-O-methyluridine-3'-phosphate
  modified_base 18: mod_base = OTHER; note = 2'-O-methylcytidine-3'-phosphate
  modified_base 19: mod_base = OTHER; note = 2'-O-methylcytidine-3'-phosphate
  modified_base 20: mod_base = OTHER; note = 2'-O-methyladenosine-3'-phosphate
  modified_base 21: mod_base = OTHER; note = 2'-O-methyladenosine-3'-phosphate attached to N-[tris(N-acetylgalactosamine-alkyl)-amidodecanoyl)]-4-hydr oxyprolinol Hyp-(N-acetylgalactosamine-alkyl)3
ggatccagtgtataaatccaa

SEQ ID NO: 3641 - RNA, 21 nt, synthetic construct
  misc_feature 1..21: note = Description of Artificial Sequence: Synthetic oligonucleotide
  source 1..21: mol_type = other RNA
  modified_base 1: mod_base = OTHER; note = 2'-O-methylcytidine-3'- phosphorothioate
  modified_base 2: mod_base = OTHER; note = 2'-O-methyladenosine-3'- phosphorothioate
  modified_base 3: mod_base = OTHER; note = 2'-O-methyladenosine-3'-phosphate
  modified_base 4: mod_base = OTHER; note = 2'-O-methylcytidine-3'-phosphate
  modified_base 5: mod_base = OTHER; note = 2'-O-methyluridine-3'-phosphate
  modified_base 6: mod_base = OTHER; note = 2'-O-methyladenosine-3'-phosphate
  modified_base 7: mod_base = OTHER; note = 2'-fluorouridine-3'-phosphate
  modified_base 8: mod_base = OTHER; note = 2'-O-methylcytidine-3'-phosphate
  modified_base 9: mod_base = OTHER; note = 2'-fluorocytidine-3'-phosphate
  modified_base 10: mod_base = OTHER; note = 2'-fluoroadenosine-3'-phosphate
  modified_base 11: mod_base = OTHER; note = 2'-fluoroadenosine-3'-phosphate
  modified_base 12: mod_base = OTHER; note = 2'-O-methylguanosine-3'-phosphate
  modified_base 13: mod_base = OTHER; note = 2'-O-methyluridine-3'-phosphate
  modified_base 14: mod_base = OTHER; note = 2'-O-methylguanosine-3'-phosphate
  modified_base 15: mod_base = OTHER; note = 2'-O-methyluridine-3'-phosphate
  modified_base 16: mod_base = OTHER; note = 2'-O-methyluridine-3'-phosphate
  modified_base 17: mod_base = OTHER; note = 2'-O-methyladenosine-3'-phosphate
  modified_base 18: mod_base = OTHER; note = 2'-O-methyluridine-3'-phosphate
  modified_base 19: mod_base = OTHER; note = 2'-O-methyladenosine-3'-phosphate
  modified_base 20: mod_base = OTHER; note = 2'-O-methylcytidine-3'-phosphate
  modified_base 21: mod_base = OTHER; note = 2'-O-methyladenosine-3'-phosphate attached to N-[tris(N-acetylgalactosamine-alkyl)-amidodecanoyl)]-4-hydr oxyprolinol Hyp-(N-acetylgalactosamine-alkyl)3
caactatccaagtgttataca

SEQ ID NO: 3642 - RNA, 21 nt, synthetic construct
  misc_feature 1..21: note = Description of Artificial Sequence: Synthetic oligonucleotide
  source 1..21: mol_type = other RNA
  modified_base 1: mod_base = OTHER; note = 2'-O-methyluridine-3'-phosphorothioate
  modified_base 2: mod_base = OTHER; note = 2'-O-methyluridine-3'-phosphorothioate
  modified_base 3: mod_base = OTHER; note = 2'-O-methylguanosine-3'-phosphate
  modified_base 4: mod_base = OTHER; note = 2'-O-methylguanosine-3'-phosphate
  modified_base 5: mod_base = OTHER; note = 2'-O-methyluridine-3'-phosphate
  modified_base 6: mod_base = OTHER; note = 2'-O-methyluridine-3'-phosphate
  modified_base 7: mod_base = OTHER; note = 2'-fluorocytidine-3'-phosphate
  modified_base 8: mod_base = OTHER; note = 2'-O-methylcytidine-3'-phosphate
  modified_base 9: mod_base = OTHER; note = 2'-fluoroadenosine-3'-phosphate
  modified_base 10: mod_base = OTHER; note = 2'-fluoroadenosine-3'-phosphate
  modified_base 11: mod_base = OTHER; note = 2'-fluoroguanosine-3'-phosphate
  modified_base 12: mod_base = OTHER; note = 2'-O-methyluridine-3'-phosphate
  modified_base 13: mod_base = OTHER; note = 2'-O-methylcytidine-3'-phosphate
  modified_base 14: mod_base = OTHER; note = 2'-O-methylcytidine-3'-phosphate
  modified_base 15: mod_base = OTHER; note = 2'-O-methyladenosine-3'-phosphate
  modified_base 16: mod_base = OTHER; note = 2'-O-methyladenosine-3'-phosphate
  modified_base 17: mod_base = OTHER; note = 2'-O-methyluridine-3'-phosphate
  modified_base 18: mod_base = OTHER; note = 2'-O-methyladenosine-3'-phosphate
  modified_base 19: mod_base = OTHER; note = 2'-O-methyluridine-3'-phosphate
  modified_base 20: mod_base = OTHER; note = 2'-O-methylguanosine-3'-phosphate
  modified_base 21: mod_base = OTHER; note = 2'-O-methyladenosine-3'-phosphate attached to N-[tris(N-acetylgalactosamine-alkyl)-amidodecanoyl)]-4-hydr oxyprolinol Hyp-(N-acetylgalactosamine-alkyl)3
ttggttccaagtccaatatga

SEQ ID NO: 3643 - RNA, 21 nt, synthetic construct
  misc_feature 1..21: note = Description of Artificial Sequence: Synthetic oligonucleotide
  source 1..21: mol_type = other RNA
  modified_base 1: mod_base = OTHER; note = 2'-O-methyluridine-3'-phosphorothioate
  modified_base 2: mod_base = OTHER; note = 2'-O-methylguanosine-3'- phosphorothioate
  modified_base 3: mod_base = OTHER; note = 2'-O-methylcytidine-3'-phosphate
  modified_base 4: mod_base = OTHER; note = 2'-O-methyluridine-3'-phosphate
  modified_base 5: mod_base = OTHER; note = 2'-O-methyluridine-3'-phosphate
  modified_base 6: mod_base = OTHER; note = 2'-O-methyladenosine-3'-phosphate
  modified_base 7: mod_base = OTHER; note = 2'-fluorouridine-3'-phosphate
  modified_base 8: mod_base = OTHER; note = 2'-O-methylguanosine-3'-phosphate
  modified_base 9: mod_base = OTHER; note = 2'-fluoroadenosine-3'-phosphate
  modified_base 10: mod_base = OTHER; note = 2'-fluoroguanosine-3'-phosphate
  modified_base 11: mod_base = OTHER; note = 2'-fluoroguanosine-3'-phosphate
  modified_base 12: mod_base = OTHER; note = 2'-O-methyluridine-3'-phosphate
  modified_base 13: mod_base = OTHER; note = 2'-O-methylguanosine-3'-phosphate
  modified_base 14: mod_base = OTHER; note = 2'-O-methyladenosine-3'-phosphate
  modified_base 15: mod_base = OTHER; note = 2'-O-methyluridine-3'-phosphate
  modified_base 16: mod_base = OTHER; note = 2'-O-methylcytidine-3'-phosphate
  modified_base 17: mod_base = OTHER; note = 2'-O-methyladenosine-3'-phosphate
  modified_base 18: mod_base = OTHER; note = 2'-O-methyladenosine-3'-phosphate
  modified_base 19: mod_base = OTHER; note = 2'-O-methyladenosine-3'-phosphate
  modified_base 20: mod_base = OTHER; note = 2'-O-methylcytidine-3'-phosphate
  modified_base 21: mod_base = OTHER; note = 2'-O-methyluridine-3'-phosphate attached to N-[tris(N-acetylgalactosamine-alkyl)-amidodecanoyl)]-4-hydr oxyprolinol Hyp-(N-acetylgalactosamine-alkyl)3
tgcttatgaggtgatcaaact

SEQ ID NO: 3644 - RNA, 21 nt, synthetic construct
  misc_feature 1..21: note = Description of Artificial Sequence: Synthetic oligonucleotide
  source 1..21: mol_type = other RNA
  modified_base 1: mod_base = OTHER; note = 2'-O-methyladenosine-3'- phosphorothioate
  modified_base 2: mod_base = OTHER; note = 2'-O-methyladenosine-3'- phosphorothioate
  modified_base 3: mod_base = OTHER; note = 2'-O-methyladenosine-3'-phosphate
  modified_base 4: mod_base = OTHER; note = 2'-O-methylcytidine-3'-phosphate
  modified_base 5: mod_base = OTHER; note = 2'-O-methyluridine-3'-phosphate
  modified_base 6: mod_base = OTHER; note = 2'-O-methylcytidine-3'-phosphate
  modified_base 7: mod_base = OTHER; note = 2'-fluoroadenosine-3'-phosphate
  modified_base 8: mod_base = OTHER; note = 2'-O-methyladenosine-3'-phosphate
  modified_base 9: mod_base = OTHER; note = 2'-fluoroadenosine-3'-phosphate
  modified_base 10: mod_base = OTHER; note = 2'-fluoroguanosine-3'-phosphate
  modified_base 11: mod_base = OTHER; note = 2'-fluoroguanosine-3'-phosphate
  modified_base 12: mod_base = OTHER; note = 2'-O-methylcytidine-3'-phosphate
  modified_base 13: mod_base = OTHER; note = 2'-O-methyluridine-3'-phosphate
  modified_base 14: mod_base = OTHER; note = 2'-O-methyladenosine-3'-phosphate
  modified_base 15: mod_base = OTHER; note = 2'-O-methylcytidine-3'-phosphate
  modified_base 16: mod_base = OTHER; note = 2'-O-methyladenosine-3'-phosphate
  modified_base 17: mod_base = OTHER; note = 2'-O-methylcytidine-3'-phosphate
  modified_base 18: mod_base = OTHER; note = 2'-O-methyladenosine-3'-phosphate
  modified_base 19: mod_base = OTHER; note = 2'-O-methyluridine-3'-phosphate
  modified_base 20: mod_base = OTHER; note = 2'-O-methylcytidine-3'-phosphate
  modified_base 21: mod_base = OTHER; note = 2'-O-methyladenosine-3'-phosphate attached to N-[tris(N-acetylgalactosamine-alkyl)-amidodecanoyl)]-4-hydr oxyprolinol Hyp-(N-acetylgalactosamine-alkyl)3
aaactcaaaggctacacatca

SEQ ID NO: 3645 - RNA, 21 nt, synthetic construct
  misc_feature 1..21: note = Description of Artificial Sequence: Synthetic oligonucleotide
  source 1..21: mol_type = other RNA
  modified_base 1: mod_base = OTHER; note = 2'-O-methyluridine-3'-phosphorothioate
  modified_base 2: mod_base = OTHER; note = 2'-O-methylcytidine-3'- phosphorothioate
  modified_base 3: mod_base = OTHER; note = 2'-O-methyluridine-3'-phosphate
  modified_base 4: mod_base = OTHER; note = 2'-O-methylcytidine-3'-phosphate
  modified_base 5: mod_base = OTHER; note = 2'-O-methyladenosine-3'-phosphate
  modified_base 6: mod_base = OTHER; note = 2'-O-methylguanosine-3'-phosphate
  modified_base 7: mod_base = OTHER; note = 2'-fluoroadenosine-3'-phosphate
  modified_base 8: mod_base = OTHER; note = 2'-O-methylcytidine-3'-phosphate
  modified_base 9: mod_base = OTHER; note = 2'-fluorocytidine-3'-phosphate
  modified_base 10: mod_base = OTHER; note = 2'-fluorouridine-3'-phosphate
  modified_base 11: mod_base = OTHER; note = 2'-fluorouridine-3'-phosphate
  modified_base 12: mod_base = OTHER; note = 2'-O-methylguanosine-3'-phosphate
  modified_base 13: mod_base = OTHER; note = 2'-O-methyluridine-3'-phosphate
  modified_base 14: mod_base = OTHER; note = 2'-O-methylguanosine-3'-phosphate
  modified_base 15: mod_base = OTHER; note = 2'-O-methyladenosine-3'-phosphate
  modified_base 16: mod_base = OTHER; note = 2'-O-methyladenosine-3'-phosphate
  modified_base 17: mod_base = OTHER; note = 2'-O-methylguanosine-3'-phosphate
  modified_base 18: mod_base = OTHER; note = 2'-O-methylguanosine-3'-phosphate
  modified_base 19: mod_base = OTHER; note = 2'-O-methyluridine-3'-phosphate
  modified_base 20: mod_base = OTHER; note = 2'-O-methylguanosine-3'-phosphate
  modified_base 21: mod_base = OTHER; note = 2'-O-methyladenosine-3'-phosphate attached to N-[tris(N-acetylgalactosamine-alkyl)-amidodecanoyl)]-4-hydr oxyprolinol Hyp-(N-acetylgalactosamine-alkyl)3
tctcagaccttgtgaaggtga

SEQ ID NO: 3646 - RNA, 21 nt, synthetic construct
  misc_feature 1..21: note = Description of Artificial Sequence: Synthetic oligonucleotide
  source 1..21: mol_type = other RNA
  modified_base 1: mod_base = OTHER; note = 2'-O-methyluridine-3'-phosphorothioate
  modified_base 2: mod_base = OTHER; note = 2'-O-methyladenosine-3'- phosphorothioate
  modified_base 3: mod_base = OTHER; note = 2'-O-methyladenosine-3'-phosphate
  modified_base 4: mod_base = OTHER; note = 2'-O-methyladenosine-3'-phosphate
  modified_base 5: mod_base = OTHER; note = 2'-O-methyladenosine-3'-phosphate
  modified_base 6: mod_base = OTHER; note = 2'-O-methyluridine-3'-phosphate
  modified_base 7: mod_base = OTHER; note = 2'-fluorocytidine-3'-phosphate
  modified_base 8: mod_base = OTHER; note = 2'-O-methylcytidine-3'-phosphate
  modified_base 9: mod_base = OTHER; note = 2'-fluoroadenosine-3'-phosphate
  modified_base 10: mod_base = OTHER; note = 2'-fluorocytidine-3'-phosphate
  modified_base 11: mod_base = OTHER; note = 2'-fluoroadenosine-3'-phosphate
  modified_base 12: mod_base = OTHER; note = 2'-O-methylguanosine-3'-phosphate
  modified_base 13: mod_base = OTHER; note = 2'-O-methylcytidine-3'-phosphate
  modified_base 14: mod_base = OTHER; note = 2'-O-methyluridine-3'-phosphate
  modified_base 15: mod_base = OTHER; note = 2'-O-methyladenosine-3'-phosphate
  modified_base 16: mod_base = OTHER; note = 2'-O-methyluridine-3'-phosphate
  modified_base 17: mod_base = OTHER; note = 2'-O-methyladenosine-3'-phosphate
  modified_base 18: mod_base = OTHER; note = 2'-O-methyluridine-3'-phosphate
  modified_base 19: mod_base = OTHER; note = 2'-O-methylcytidine-3'-phosphate
  modified_base 20: mod_base = OTHER; note = 2'-O-methylcytidine-3'-phosphate
  modified_base 21: mod_base = OTHER; note = 2'-O-methyluridine-3'-phosphate attached to N-[tris(N-acetylgalactosamine-alkyl)-amidodecanoyl)]-4-hydr oxyprolinol Hyp-(N-acetylgalactosamine-alkyl)3
taaaatccacagctatatcct

SEQ ID NO: 3647 - RNA, 21 nt, synthetic construct
  misc_feature 1..21: note = Description of Artificial Sequence: Synthetic oligonucleotide
  source 1..21: mol_type = other RNA
  modified_base 1: mod_base = OTHER; note = 2'-O-methylcytidine-3'- phosphorothioate
  modified_base 2: mod_base = OTHER; note = 2'-O-methylcytidine-3'- phosphorothioate
  modified_base 3: mod_base = OTHER; note = 2'-O-methyluridine-3'-phosphate
  modified_base 4: mod_base = OTHER; note = 2'-O-methyluridine-3'-phosphate
  modified_base 5: mod_base = OTHER; note = 2'-O-methylcytidine-3'-phosphate
  modified_base 6: mod_base = OTHER; note = 2'-O-methyladenosine-3'-phosphate
  modified_base 7: mod_base = OTHER; note = 2'-fluorocytidine-3'-phosphate
  modified_base 8: mod_base = OTHER; note = 2'-O-methyluridine-3'-phosphate
  modified_base 9: mod_base = OTHER; note = 2'-fluoroguanosine-3'-phosphate
  modified_base 10: mod_base = OTHER; note = 2'-fluoroadenosine-3'-phosphate
  modified_base 11: mod_base = OTHER; note = 2'-fluoroadenosine-3'-phosphate
  modified_base 12: mod_base = OTHER; note = 2'-O-methylcytidine-3'-phosphate
  modified_base 13: mod_base = OTHER; note = 2'-O-methyladenosine-3'-phosphate
  modified_base 14: mod_base = OTHER; note = 2'-O-methyluridine-3'-phosphate
  modified_base 15: mod_base = OTHER; note = 2'-O-methylguanosine-3'-phosphate
  modified_base 16: mod_base = OTHER; note = 2'-O-methylcytidine-3'-phosphate
  modified_base 17: mod_base = OTHER; note = 2'-O-methylcytidine-3'-phosphate
  modified_base 18: mod_base = OTHER; note = 2'-O-methyluridine-3'-phosphate
  modified_base 19: mod_base = OTHER; note = 2'-O-methyladenosine-3'-phosphate
  modified_base 20: mod_base = OTHER; note = 2'-O-methylguanosine-3'-phosphate
  modified_base 21: mod_base = OTHER; note = 2'-O-methyluridine-3'-phosphate attached to N-[tris(N-acetylgalactosamine-alkyl)-amidodecanoyl)]-4-hydr oxyprolinol Hyp-(N-acetylgalactosamine-alkyl)3
ccttcactgaacatgcctagt

SEQ ID NO: 3648 - RNA, 21 nt, synthetic construct
  misc_feature 1..21: note = Description of Artificial Sequence: Synthetic oligonucleotide
  source 1..21: mol_type = other RNA
  modified_base 1: mod_base = OTHER; note = 2'-O-methylguanosine-3'- phosphorothioate
  modified_base 2: mod_base = OTHER; note = 2'-O-methylguanosine-3'- phosphorothioate
  modified_base 3: mod_base = OTHER; note = 2'-O-methylguanosine-3'-phosphate
  modified_base 4: mod_base = OTHER; note = 2'-O-methyladenosine-3'-phosphate
  modified_base 5: mod_base = OTHER; note = 2'-O-methyluridine-3'-phosphate
  modified_base 6: mod_base = OTHER; note = 2'-O-methylcytidine-3'-phosphate
  modified_base 7: mod_base = OTHER; note = 2'-fluorocytidine-3'-phosphate
  modified_base 8: mod_base = OTHER; note = 2'-O-methyladenosine-3'-phosphate
  modified_base 9: mod_base = OTHER; note = 2'-fluoroguanosine-3'-phosphate
  modified_base 10: mod_base = OTHER; note = 2'-fluorouridine-3'-phosphate
  modified_base 11: mod_base = OTHER; note = 2'-fluoroguanosine-3'-phosphate
  modified_base 12: mod_base = OTHER; note = 2'-O-methyluridine-3'-phosphate
  modified_base 13: mod_base = OTHER; note = 2'-O-methyladenosine-3'-phosphate
  modified_base 14: mod_base = OTHER; note = 2'-O-methyluridine-3'-phosphate
  modified_base 15: mod_base = OTHER; note = 2'-O-methyladenosine-3'-phosphate
  modified_base 16: mod_base = OTHER; note = 2'-O-methyladenosine-3'-phosphate
  modified_base 17: mod_base = OTHER; note = 2'-O-methyladenosine-3'-phosphate
  modified_base 18: mod_base = OTHER; note = 2'-O-methyluridine-3'-phosphate
  modified_base 19: mod_base = OTHER; note = 2'-O-methylcytidine-3'-phosphate
  modified_base 20: mod_base = OTHER; note = 2'-O-methylcytidine-3'-phosphate
  modified_base 21: mod_base = OTHER; note = 2'-O-methyladenosine-3'-phosphate attached to N-[tris(N-acetylgalactosamine-alkyl)-amidodecanoyl)]-4-hydr oxyprolinol Hyp-(N-acetylgalactosamine-alkyl)3
gggatccagtgtataaatcca

SEQ ID NO: 3649 - RNA, 21 nt, synthetic construct
  misc_feature 1..21: note = Description of Artificial Sequence: Synthetic oligonucleotide
  source 1..21: mol_type = other RNA
  modified_base 1: mod_base = OTHER; note = 2'-O-methylcytidine-3'- phosphorothioate
  modified_base 2: mod_base = OTHER; note = 2'-O-methyladenosine-3'- phosphorothioate
  modified_base 3: mod_base = OTHER; note = 2'-O-methyladenosine-3'-phosphate
  modified_base 4: mod_base = OTHER; note = 2'-O-methyluridine-3'-phosphate
  modified_base 5: mod_base = OTHER; note = 2'-O-methyladenosine-3'-phosphate
  modified_base 6: mod_base = OTHER; note = 2'-O-methyladenosine-3'-phosphate
  modified_base 7: mod_base = OTHER; note = 2'-fluoroadenosine-3'-phosphate
  modified_base 8: mod_base = OTHER; note = 2'-O-methylcytidine-3'-phosphate
  modified_base 9: mod_base = OTHER; note = 2'-fluorocytidine-3'-phosphate
  modified_base 10: mod_base = OTHER; note = 2'-fluorouridine-3'-phosphate
  modified_base 11: mod_base = OTHER; note = 2'-fluorouridine-3'-phosphate
  modified_base 12: mod_base = OTHER; note = 2'-O-methylguanosine-3'-phosphate
  modified_base 13: mod_base = OTHER; note = 2'-O-methyladenosine-3'-phosphate
  modified_base 14: mod_base = OTHER; note = 2'-O-methyladenosine-3'-phosphate
  modified_base 15: mod_base = OTHER; note = 2'-O-methylcytidine-3'-phosphate
  modified_base 16: mod_base = OTHER; note = 2'-O-methyladenosine-3'-phosphate
  modified_base 17: mod_base = OTHER; note = 2'-O-methylguanosine-3'-phosphate
  modified_base 18: mod_base = OTHER; note = 2'-O-methyluridine-3'-phosphate
  modified_base 19: mod_base = OTHER; note = 2'-O-methylguanosine-3'-phosphate
  modified_base 20: mod_base = OTHER; note = 2'-O-methyladenosine-3'-phosphate
  modified_base 21: mod_base = OTHER; note = 2'-O-methyladenosine-3'-phosphate attached to N-[tris(N-acetylgalactosamine-alkyl)-amidodecanoyl)]-4-hydr oxyprolinol Hyp-(N-acetylgalactosamine-alkyl)3
caataaaccttgaacagtgaa

SEQ ID NO: 3650 - RNA, 21 nt, synthetic construct
  misc_feature 1..21: note = Description of Artificial Sequence: Synthetic oligonucleotide
  source 1..21: mol_type = other RNA
  modified_base 1: mod_base = OTHER; note = 2'-O-methylguanosine-3'- phosphorothioate
  modified_base 2: mod_base = OTHER; note = 2'-O-methylguanosine-3'- phosphorothioate
  modified_base 3: mod_base = OTHER; note = 2'-O-methylcytidine-3'-phosphate
  modified_base 4: mod_base = OTHER; note = 2'-O-methylcytidine-3'-phosphate
  modified_base 5: mod_base = OTHER; note = 2'-O-methyluridine-3'-phosphate
  modified_base 6: mod_base = OTHER; note = 2'-O-methylguanosine-3'-phosphate
  modified_base 7: mod_base = OTHER; note = 2'-fluorouridine-3'-phosphate
  modified_base 8: mod_base = OTHER; note = 2'-O-methylguanosine-3'-phosphate
  modified_base 9: mod_base = OTHER; note = 2'-fluorocytidine-3'-phosphate
  modified_base 10: mod_base = OTHER; note = 2'-fluorocytidine-3'-phosphate
  modified_base 11: mod_base = OTHER; note = 2'-fluoroadenosine-3'-phosphate
  modified_base 12: mod_base = OTHER; note = 2'-O-methyluridine-3'-phosphate
  modified_base 13: mod_base = OTHER; note = 2'-O-methylcytidine-3'-phosphate
  modified_base 14: mod_base = OTHER; note = 2'-O-methyladenosine-3'-phosphate
  modified_base 15: mod_base = OTHER; note = 2'-O-methylguanosine-3'-phosphate
  modified_base 16: mod_base = OTHER; note = 2'-O-methyluridine-3'-phosphate
  modified_base 17: mod_base = OTHER; note = 2'-O-methyladenosine-3'-phosphate
  modified_base 18: mod_base = OTHER; note = 2'-O-methyluridine-3'-phosphate
  modified_base 19: mod_base = OTHER; note = 2'-O-methylcytidine-3'-phosphate
  modified_base 20: mod_base = OTHER; note = 2'-O-methyluridine-3'-phosphate
  modified_base 21: mod_base = OTHER; note = 2'-O-methyluridine-3'-phosphate attached to N-[tris(N-acetylgalactosamine-alkyl)-amidodecanoyl)]-4-hydr oxyprolinol Hyp-(N-acetylgalactosamine-alkyl)3
ggcctgtgccatcagtatctt

SEQ ID NO: 3651 - RNA, 21 nt, synthetic construct
  misc_feature 1..21: note = Description of Artificial Sequence: Synthetic oligonucleotide
  source 1..21: mol_type = other RNA
  modified_base 1: mod_base = OTHER; note = 2'-O-methyluridine-3'-phosphorothioate
  modified_base 2: mod_base = OTHER; note = 2'-O-methyluridine-3'-phosphorothioate
  modified_base 3: mod_base = OTHER; note = 2'-O-methylguanosine-3'-phosphate
  modified_base 4: mod_base = OTHER; note = 2'-O-methyluridine-3'-phosphate
  modified_base 5: mod_base = OTHER; note = 2'-O-methyluridine-3'-phosphate
  modified_base 6: mod_base = OTHER; note = 2'-O-methylguanosine-3'-phosphate
  modified_base 7: mod_base = OTHER; note = 2'-fluoroadenosine-3'-phosphate
  modified_base 8: mod_base = OTHER; note = 2'-O-methyluridine-3'-phosphate
  modified_base 9: mod_base = OTHER; note = 2'-fluoroguanosine-3'-phosphate
  modified_base 10: mod_base = OTHER; note = 2'-fluorouridine-3'-phosphate
  modified_base 11: mod_base = OTHER; note = 2'-fluorocytidine-3'-phosphate
  modified_base 12: mod_base = OTHER; note = 2'-O-methyladenosine-3'-phosphate
  modified_base 13: mod_base = OTHER; note = 2'-O-methyluridine-3'-phosphate
  modified_base 14: mod_base = OTHER; note = 2'-O-methylcytidine-3'-phosphate
  modified_base 15: mod_base = OTHER; note = 2'-O-methylguanosine-3'-phosphate
  modified_base 16: mod_base = OTHER; note = 2'-O-methyladenosine-3'-phosphate
  modified_base 17: mod_base = OTHER; note = 2'-O-methyladenosine-3'-phosphate
  modified_base 18: mod_base = OTHER; note = 2'-O-methylguanosine-3'-phosphate
  modified_base 19: mod_base = OTHER; note = 2'-O-methyladenosine-3'-phosphate
  modified_base 20: mod_base = OTHER; note = 2'-O-methylcytidine-3'-phosphate
  modified_base 21: mod_base = OTHER; note = 2'-O-methyladenosine-3'-phosphate attached to N-[tris(N-acetylgalactosamine-alkyl)-amidodecanoyl)]-4-hydr oxyprolinol Hyp-(N-acetylgalactosamine-alkyl)3
ttgttgatgtcatcgaagaca

SEQ ID NO: 3652 - RNA, 21 nt, synthetic construct
  misc_feature 1..21: note = Description of Artificial Sequence: Synthetic oligonucleotide
  source 1..21: mol_type = other RNA
  modified_base 1: mod_base = OTHER; note = 2'-O-methylguanosine-3'- phosphorothioate
  modified_base 2: mod_base = OTHER; note = 2'-O-methylguanosine-3'- phosphorothioate
  modified_base 3: mod_base = OTHER; note = 2'-O-methyladenosine-3'-phosphate
  modified_base 4: mod_base = OTHER; note = 2'-O-methyluridine-3'-phosphate
  modified_base 5: mod_base = OTHER; note = 2'-O-methylcytidine-3'-phosphate
  modified_base 6: mod_base = OTHER; note = 2'-O-methyluridine-3'-phosphate
  modified_base 7: mod_base = OTHER; note = 2'-fluorouridine-3'-phosphate
  modified_base 8: mod_base = OTHER; note = 2'-O-methyladenosine-3'-phosphate
  modified_base 9: mod_base = OTHER; note = 2'-fluorouridine-3'-phosphate
  modified_base 10: mod_base = OTHER; note = 2'-fluorouridine-3'-phosphate
  modified_base 11: mod_base = OTHER; note = 2'-fluorouridine-3'-phosphate
  modified_base 12: mod_base = OTHER; note = 2'-O-methyluridine-3'-phosphate
  modified_base 13: mod_base = OTHER; note = 2'-O-methylguanosine-3'-phosphate
  modified_base 14: mod_base = OTHER; note = 2'-O-methyluridine-3'-phosphate
  modified_base 15: mod_base = OTHER; note = 2'-O-methylguanosine-3'-phosphate
  modified_base 16: mod_base = OTHER; note = 2'-O-methyladenosine-3'-phosphate
  modified_base 17: mod_base = OTHER; note = 2'-O-methyladenosine-3'-phosphate
  modified_base 18: mod_base = OTHER; note = 2'-O-methylcytidine-3'-phosphate
  modified_base 19: mod_base = OTHER; note = 2'-O-methyluridine-3'-phosphate
  modified_base 20: mod_base = OTHER; note = 2'-O-methyladenosine-3'-phosphate
  modified_base 21: mod_base = OTHER; note = 2'-O-methyluridine-3'-phosphate attached to N-[tris(N-acetylgalactosamine-alkyl)-amidodecanoyl)]-4-hydr oxyprolinol Hyp-(N-acetylgalactosamine-alkyl)3
ggatcttattttgtgaactat

SEQ ID NO: 3653 - RNA, 21 nt, synthetic construct
  misc_feature 1..21: note = Description of Artificial Sequence: Synthetic oligonucleotide
  source 1..21: mol_type = other RNA
  modified_base 1: mod_base = OTHER; note = 2'-O-methyladenosine-3'- phosphorothioate
  modified_base 2: mod_base = OTHER; note = 2'-O-methyladenosine-3'- phosphorothioate
  modified_base 3: mod_base = OTHER; note = 2'-O-methylguanosine-3'-phosphate
  modified_base 4: mod_base = OTHER; note = 2'-O-methylguanosine-3'-phosphate
  modified_base 5: mod_base = OTHER; note = 2'-O-methyladenosine-3'-phosphate
  modified_base 6: mod_base = OTHER; note = 2'-O-methyluridine-3'-phosphate
  modified_base 7: mod_base = OTHER; note = 2'-fluorocytidine-3'-phosphate
  modified_base 8: mod_base = OTHER; note = 2'-O-methyluridine-3'-phosphate
  modified_base 9: mod_base = OTHER; note = 2'-fluorouridine-3'-phosphate
  modified_base 10: mod_base = OTHER; note = 2'-fluoroadenosine-3'-phosphate
  modified_base 11: mod_base = OTHER; note = 2'-fluorouridine-3'-phosphate
  modified_base 12: mod_base = OTHER; note = 2'-O-methyluridine-3'-phosphate
  modified_base 13: mod_base = OTHER; note = 2'-O-methyluridine-3'-phosphate
  modified_base 14: mod_base = OTHER; note = 2'-O-methyluridine-3'-phosphate
  modified_base 15: mod_base = OTHER; note = 2'-O-methylguanosine-3'-phosphate
  modified_base 16: mod_base = OTHER; note = 2'-O-methyluridine-3'-phosphate
  modified_base 17: mod_base = OTHER; note = 2'-O-methylguanosine-3'-phosphate
  modified_base 18: mod_base = OTHER; note = 2'-O-methyladenosine-3'-phosphate
  modified_base 19: mod_base = OTHER; note = 2'-O-methyladenosine-3'-phosphate
  modified_base 20: mod_base = OTHER; note = 2'-O-methylcytidine-3'-phosphate
  modified_base 21: mod_base = OTHER; note = 2'-O-methyluridine-3'-phosphate attached to N-[tris(N-acetylgalactosamine-alkyl)-amidodecanoyl)]-4-hydr oxyprolinol Hyp-(N-acetylgalactosamine-alkyl)3
aaggatcttattttgtgaact

SEQ ID NO: 3654 - RNA, 21 nt, synthetic construct
  misc_feature 1..21: note = Description of Artificial Sequence: Synthetic oligonucleotide
  source 1..21: mol_type = other RNA
  modified_base 1: mod_base = OTHER; note = 2'-O-methyladenosine-3'- phosphorothioate
  modified_base 2: mod_base = OTHER; note = 2'-O-methyluridine-3'-phosphorothioate
  modified_base 3: mod_base = OTHER; note = 2'-O-methylcytidine-3'-phosphate
  modified_base 4: mod_base = OTHER; note = 2'-O-methyladenosine-3'-phosphate
  modified_base 5: mod_base = OTHER; note = 2'-O-methyluridine-3'-phosphate
  modified_base 6: mod_base = OTHER; note = 2'-O-methylguanosine-3'-phosphate
  modified_base 7: mod_base = OTHER; note = 2'-fluorouridine-3'-phosphate
  modified_base 8: mod_base = OTHER; note = 2'-O-methylcytidine-3'-phosphate
  modified_base 9: mod_base = OTHER; note = 2'-fluorouridine-3'-phosphate
  modified_base 10: mod_base = OTHER; note = 2'-fluorouridine-3'-phosphate
  modified_base 11: mod_base = OTHER; note = 2'-fluoroguanosine-3'-phosphate
  modified_base 12: mod_base = OTHER; note = 2'-O-methyluridine-3'-phosphate
  modified_base 13: mod_base = OTHER; note = 2'-O-methylguanosine-3'-phosphate
  modified_base 14: mod_base = OTHER; note = 2'-O-methylcytidine-3'-phosphate
  modified_base 15: mod_base = OTHER; note = 2'-O-methyladenosine-3'-phosphate
  modified_base 16: mod_base = OTHER; note = 2'-O-methyluridine-3'-phosphate
  modified_base 17: mod_base = OTHER; note = 2'-O-methyladenosine-3'-phosphate
  modified_base 18: mod_base = OTHER; note = 2'-O-methyladenosine-3'-phosphate
  modified_base 19: mod_base = OTHER; note = 2'-O-methyluridine-3'-phosphate
  modified_base 20: mod_base = OTHER; note = 2'-O-methyluridine-3'-phosphate
  modified_base 21: mod_base = OTHER; note = 2'-O-methyladenosine-3'-phosphate attached to N-[tris(N-acetylgalactosamine-alkyl)-amidodecanoyl)]-4-hydr oxyprolinol Hyp-(N-acetylgalactosamine-alkyl)3
atcatgtcttgtgcataatta

SEQ ID NO: 3655 - RNA, 21 nt, synthetic construct
  misc_feature 1..21: note = Description of Artificial Sequence: Synthetic oligonucleotide
  source 1..21: mol_type = other RNA
  modified_base 1: mod_base = OTHER; note = 2'-O-methyluridine-3'-phosphorothioate
  modified_base 2: mod_base = OTHER; note = 2'-O-methylguanosine-3'- phosphorothioate
  modified_base 3: mod_base = OTHER; note = 2'-O-methyluridine-3'-phosphate
  modified_base 4: mod_base = OTHER; note = 2'-O-methylcytidine-3'-phosphate
  modified_base 5: mod_base = OTHER; note = 2'-O-methyladenosine-3'-phosphate
  modified_base 6: mod_base = OTHER; note = 2'-O-methyluridine-3'-phosphate
  modified_base 7: mod_base = OTHER; note = 2'-fluoroadenosine-3'-phosphate
  modified_base 8: mod_base = OTHER; note = 2'-O-methyluridine-3'-phosphate
  modified_base 9: mod_base = OTHER; note = 2'-fluorocytidine-3'-phosphate
  modified_base 10: mod_base = OTHER; note = 2'-fluoroadenosine-3'-phosphate
  modified_base 11: mod_base = OTHER; note = 2'-fluorouridine-3'-phosphate
  modified_base 12: mod_base = OTHER; note = 2'-O-methyluridine-3'-phosphate
  modified_base 13: mod_base = OTHER; note = 2'-O-methyluridine-3'-phosphate
  modified_base 14: mod_base = OTHER; note = 2'-O-methylcytidine-3'-phosphate
  modified_base 15: mod_base = OTHER; note = 2'-O-methyladenosine-3'-phosphate
  modified_base 16: mod_base = OTHER; note = 2'-O-methylcytidine-3'-phosphate
  modified_base 17: mod_base = OTHER; note = 2'-O-methyluridine-3'-phosphate
  modified_base 18: mod_base = OTHER; note = 2'-O-methylguanosine-3'-phosphate
  modified_base 19: mod_base = OTHER; note = 2'-O-methyluridine-3'-phosphate
  modified_base 20: mod_base = OTHER; note = 2'-O-methylcytidine-3'-phosphate
  modified_base 21: mod_base = OTHER; note = 2'-O-methyluridine-3'-phosphate attached to N-[tris(N-acetylgalactosamine-alkyl)-amidodecanoyl)]-4-hydr oxyprolinol Hyp-(N-acetylgalactosamine-alkyl)3
tgtcatatcatttcactgtct

SEQ ID NO: 3656 - RNA, 21 nt, synthetic construct
  misc_feature 1..21: note = Description of Artificial Sequence: Synthetic oligonucleotide
  source 1..21: mol_type = other RNA
  modified_base 1: mod_base = OTHER; note = 2'-O-methyluridine-3'-phosphorothioate
  modified_base 2: mod_base = OTHER; note = 2'-O-methylcytidine-3'- phosphorothioate
  modified_base 3: mod_base = OTHER; note = 2'-O-methyladenosine-3'-phosphate
  modified_base 4: mod_base = OTHER; note = 2'-O-methyluridine-3'-phosphate
  modified_base 5: mod_base = OTHER; note = 2'-O-methyladenosine-3'-phosphate
  modified_base 6: mod_base = OTHER; note = 2'-O-methyluridine-3'-phosphate
  modified_base 7: mod_base = OTHER; note = 2'-fluorocytidine-3'-phosphate
  modified_base 8: mod_base = OTHER; note = 2'-O-methyladenosine-3'-phosphate
  modified_base 9: mod_base = OTHER; note = 2'-fluorouridine-3'-phosphate
  modified_base 10: mod_base = OTHER; note = 2'-fluorouridine-3'-phosphate
  modified_base 11: mod_base = OTHER; note = 2'-fluorouridine-3'-phosphate
  modified_base 12: mod_base = OTHER; note = 2'-O-methylcytidine-3'-phosphate
  modified_base 13: mod_base = OTHER; note = 2'-O-methyladenosine-3'-phosphate
  modified_base 14: mod_base = OTHER; note = 2'-O-methylcytidine-3'-phosphate
  modified_base 15: mod_base = OTHER; note = 2'-O-methyluridine-3'-phosphate
  modified_base 16: mod_base = OTHER; note = 2'-O-methylguanosine-3'-phosphate
  modified_base 17: mod_base = OTHER; note = 2'-O-methyluridine-3'-phosphate
  modified_base 18: mod_base = OTHER; note = 2'-O-methylcytidine-3'-phosphate
  modified_base 19: mod_base = OTHER; note = 2'-O-methyluridine-3'-phosphate
  modified_base 20: mod_base = OTHER; note = 2'-O-methyladenosine-3'-phosphate
  modified_base 21: mod_base = OTHER; note = 2'-O-methyladenosine-3'-phosphate attached to N-[tris(N-acetylgalactosamine-alkyl)-amidodecanoyl)]-4-hydr oxyprolinol Hyp-(N-acetylgalactosamine-alkyl)3
tcatatcatttcactgtctaa

SEQ ID NO: 3657 - RNA, 21 nt, synthetic construct
  misc_feature 1..21: note = Description of Artificial Sequence: Synthetic oligonucleotide
  source 1..21: mol_type = other RNA
  modified_base 1: mod_base = OTHER; note = 2'-O-methyladenosine-3'- phosphorothioate
  modified_base 2: mod_base = OTHER; note = 2'-O-methyluridine-3'-phosphorothioate
  modified_base 3: mod_base = OTHER; note = 2'-O-methyluridine-3'-phosphate
  modified_base 4: mod_base = OTHER; note = 2'-O-methyluridine-3'-phosphate
  modified_base 5: mod_base = OTHER; note = 2'-O-methyladenosine-3'-phosphate
  modified_base 6: mod_base = OTHER; note = 2'-O-methyluridine-3'-phosphate
  modified_base 7: mod_base = OTHER; note = 2'-fluoroadenosine-3'-phosphate
  modified_base 8: mod_base = OTHER; note = 2'-O-methyladenosine-3'-phosphate
  modified_base 9: mod_base = OTHER; note = 2'-fluorouridine-3'-phosphate
  modified_base 10: mod_base = OTHER; note = 2'-fluorocytidine-3'-phosphate
  modified_base 11: mod_base = OTHER; note = 2'-fluorouridine-3'-phosphate
  modified_base 12: mod_base = OTHER; note = 2'-O-methyluridine-3'-phosphate
  modified_base 13: mod_base = OTHER; note = 2'-O-methylcytidine-3'-phosphate
  modified_base 14: mod_base = OTHER; note = 2'-O-methyluridine-3'-phosphate
  modified_base 15: mod_base = OTHER; note = 2'-O-methyladenosine-3'-phosphate
  modified_base 16: mod_base = OTHER; note = 2'-O-methyladenosine-3'-phosphate
  modified_base 17: mod_base = OTHER; note = 2'-O-methyladenosine-3'-phosphate
  modified_base 18: mod_base = OTHER; note = 2'-O-methylguanosine-3'-phosphate
  modified_base 19: mod_base = OTHER; note = 2'-O-methylguanosine-3'-phosphate
  modified_base 20: mod_base = OTHER; note = 2'-O-methyladenosine-3'-phosphate
  modified_base 21: mod_base = OTHER; note = 2'-O-methyladenosine-3'-phosphate attached to N-[tris(N-acetylgalactosamine-alkyl)-amidodecanoyl)]-4-hydr oxyprolinol Hyp-(N-acetylgalactosamine-alkyl)3
atttataatcttctaaaggaa

SEQ ID NO: 3658 - RNA, 21 nt, synthetic construct
  misc_feature 1..21: note = Description of Artificial Sequence: Synthetic oligonucleotide
  source 1..21: mol_type = other RNA
  modified_base 1: mod_base = OTHER; note = 2'-O-methyluridine-3'-phosphorothioate
  modified_base 2: mod_base = OTHER; note = 2'-O-methylguanosine-3'- phosphorothioate
  modified_base 3: mod_base = OTHER; note = 2'-O-methylguanosine-3'-phosphate
  modified_base 4: mod_base = OTHER; note = 2'-O-methyluridine-3'-phosphate
  modified_base 5: mod_base = OTHER; note = 2'-O-methyluridine-3'-phosphate
  modified_base 6: mod_base = OTHER; note = 2'-O-methyluridine-3'-phosphate
  modified_base 7: mod_base = OTHER; note = 2'-fluoroguanosine-3'-phosphate
  modified_base 8: mod_base = OTHER; note = 2'-O-methyluridine-3'-phosphate
  modified_base 9: mod_base = OTHER; note = 2'-fluoroadenosine-3'-phosphate
  modified_base 10: mod_base = OTHER; note = 2'-fluoroadenosine-3'-phosphate
  modified_base 11: mod_base = OTHER; note = 2'-fluoroadenosine-3'-phosphate
  modified_base 12: mod_base = OTHER; note = 2'-O-methyladenosine-3'-phosphate
  modified_base 13: mod_base = OTHER; note = 2'-O-methyluridine-3'-phosphate
  modified_base 14: mod_base = OTHER; note = 2'-O-methylcytidine-3'-phosphate
  modified_base 15: mod_base = OTHER; note = 2'-O-methylcytidine-3'-phosphate
  modified_base 16: mod_base = OTHER; note = 2'-O-methyladenosine-3'-phosphate
  modified_base 17: mod_base = OTHER; note = 2'-O-methylcytidine-3'-phosphate
  modified_base 18: mod_base = OTHER; note = 2'-O-methyladenosine-3'-phosphate
  modified_base 19: mod_base = OTHER; note = 2'-O-methylguanosine-3'-phosphate
  modified_base 20: mod_base = OTHER; note = 2'-O-methylcytidine-3'-phosphate
  modified_base 21: mod_base = OTHER; note = 2'-O-methyluridine-3'-phosphate attached to N-[tris(N-acetylgalactosamine-alkyl)-amidodecanoyl)]-4-hydr oxyprolinol Hyp-(N-acetylgalactosamine-alkyl)3
tggtttgtaaaatccacagct

SEQ ID NO: 3659 - RNA, 21 nt, synthetic construct
  misc_feature 1..21: note = Description of Artificial Sequence: Synthetic oligonucleotide
  source 1..21: mol_type = other RNA
  modified_base 1: mod_base = OTHER; note = 2'-O-methyladenosine-3'- phosphorothioate
  modified_base 2: mod_base = OTHER; note = 2'-O-methyluridine-3'-phosphorothioate
  modified_base 3: mod_base = OTHER; note = 2'-O-methylguanosine-3'-phosphate
  modified_base 4: mod_base = OTHER; note = 2'-O-methylcytidine-3'-phosphate
  modified_base 5: mod_base = OTHER; note = 2'-O-methyluridine-3'-phosphate
  modified_base 6: mod_base = OTHER; note = 2'-O-methylguanosine-3'-phosphate
  modified_base 7: mod_base = OTHER; note = 2'-fluoroguanosine-3'-phosphate
  modified_base 8: mod_base = OTHER; note = 2'-O-methyladenosine-3'-phosphate
  modified_base 9: mod_base = OTHER; note = 2'-fluorouridine-3'-phosphate
  modified_base 10: mod_base = OTHER; note = 2'-fluoroguanosine-3'-phosphate
  modified_base 11: mod_base = OTHER; note = 2'-fluoroguanosine-3'-phosphate
  modified_base 12: mod_base = OTHER; note = 2'-O-methyluridine-3'-phosphate
  modified_base 13: mod_base = OTHER; note = 2'-O-methyladenosine-3'-phosphate
  modified_base 14: mod_base = OTHER; note = 2'-O-methyluridine-3'-phosphate
  modified_base 15: mod_base = OTHER; note = 2'-O-methyluridine-3'-phosphate
  modified_base 16: mod_base = OTHER; note = 2'-O-methyladenosine-3'-phosphate
  modified_base 17: mod_base = OTHER; note = 2'-O-methyladenosine-3'-phosphate
  modified_base 18: mod_base = OTHER; note = 2'-O-methyluridine-3'-phosphate
  modified_base 19: mod_base = OTHER; note = 2'-O-methylcytidine-3'-phosphate
  modified_base 20: mod_base = OTHER; note = 2'-O-methyluridine-3'-phosphate
  modified_base 21: mod_base = OTHER; note = 2'-O-methyluridine-3'-phosphate attached to N-[tris(N-acetylgalactosamine-alkyl)-amidodecanoyl)]-4-hydr oxyprolinol Hyp-(N-acetylgalactosamine-alkyl)3
atgctggatggtattaatctt

SEQ ID NO: 3660 - RNA, 21 nt, synthetic construct
  misc_feature 1..21: note = Description of Artificial Sequence: Synthetic oligonucleotide
  source 1..21: mol_type = other RNA
  modified_base 1: mod_base = OTHER; note = 2'-O-methyladenosine-3'- phosphorothioate
  modified_base 2: mod_base = OTHER; note = 2'-O-methyladenosine-3'- phosphorothioate
  modified_base 3: mod_base = OTHER; note = 2'-O-methylcytidine-3'-phosphate
  modified_base 4: mod_base = OTHER; note = 2'-O-methyluridine-3'-phosphate
  modified_base 5: mod_base = OTHER; note = 2'-O-methyladenosine-3'-phosphate
  modified_base 6: mod_base = OTHER; note = 2'-O-methyluridine-3'-phosphate
  modified_base 7: mod_base = OTHER; note = 2'-fluoroadenosine-3'-phosphate
  modified_base 8: mod_base = OTHER; note = 2'-O-methyluridine-3'-phosphate
  modified_base 9: mod_base = OTHER; note = 2'-fluorocytidine-3'-phosphate
  modified_base 10: mod_base = OTHER; note = 2'-fluoroadenosine-3'-phosphate
  modified_base 11: mod_base = OTHER; note = 2'-fluoroguanosine-3'-phosphate
  modified_base 12: mod_base = OTHER; note = 2'-O-methyluridine-3'-phosphate
  modified_base 13: mod_base = OTHER; note = 2'-O-methyladenosine-3'-phosphate
  modified_base 14: mod_base = OTHER; note = 2'-O-methylguanosine-3'-phosphate
  modified_base 15: mod_base = OTHER; note = 2'-O-methyluridine-3'-phosphate
  modified_base 16: mod_base = OTHER; note = 2'-O-methylguanosine-3'-phosphate
  modified_base 17: mod_base = OTHER; note = 2'-O-methyluridine-3'-phosphate
  modified_base 18: mod_base = OTHER; note = 2'-O-methyladenosine-3'-phosphate
  modified_base 19: mod_base = OTHER; note = 2'-O-methylcytidine-3'-phosphate
  modified_base 20: mod_base = OTHER; note = 2'-O-methyladenosine-3'-phosphate
  modified_base 21: mod_base = OTHER; note = 2'-O-methyluridine-3'-phosphate attached to N-[tris(N-acetylgalactosamine-alkyl)-amidodecanoyl)]-4-hydr oxyprolinol Hyp-(N-acetylgalactosamine-alkyl)3
aactatatcagtagtgtacat

SEQ ID NO: 3661 - RNA, 21 nt, synthetic construct
  misc_feature 1..21: note = Description of Artificial Sequence: Synthetic oligonucleotide
  source 1..21: mol_type = other RNA
  modified_base 1: mod_base = OTHER; note = 2'-O-methyladenosine-3'- phosphorothioate
  modified_base 2: mod_base = OTHER; note = 2'-O-methyluridine-3'-phosphorothioate
  modified_base 3: mod_base = OTHER; note = 2'-O-methylcytidine-3'-phosphate
  modified_base 4: mod_base = OTHER; note = 2'-O-methyladenosine-3'-phosphate
  modified_base 5: mod_base = OTHER; note = 2'-O-methyladenosine-3'-phosphate
  modified_base 6: mod_base = OTHER; note = 2'-O-methylcytidine-3'-phosphate
  modified_base 7: mod_base = OTHER; note = 2'-fluorouridine-3'-phosphate
  modified_base 8: mod_base = OTHER; note = 2'-O-methylcytidine-3'-phosphate
  modified_base 9: mod_base = OTHER; note = 2'-fluorocytidine-3'-phosphate
  modified_base 10: mod_base = OTHER; note = 2'-fluorouridine-3'-phosphate
  modified_base 11: mod_base = OTHER; note = 2'-fluoroguanosine-3'-phosphate
  modified_base 12: mod_base = OTHER; note = 2'-O-methyladenosine-3'-phosphate
  modified_base 13: mod_base = OTHER; note = 2'-O-methyladenosine-3'-phosphate
  modified_base 14: mod_base = OTHER; note = 2'-O-methylguanosine-3'-phosphate
  modified_base 15: mod_base = OTHER; note = 2'-O-methyluridine-3'-phosphate
  modified_base 16: mod_base = OTHER; note = 2'-O-methyluridine-3'-phosphate
  modified_base 17: mod_base = OTHER; note = 2'-O-methyladenosine-3'-phosphate
  modified_base 18: mod_base = OTHER; note = 2'-O-methylguanosine-3'-phosphate
  modified_base 19: mod_base = OTHER; note = 2'-O-methyladenosine-3'-phosphate
  modified_base 20: mod_base = OTHER; note = 2'-O-methyladenosine-3'-phosphate
  modified_base 21: mod_base = OTHER; note = 2'-O-methyladenosine-3'-phosphate attached to N-[tris(N-acetylgalactosamine-alkyl)-amidodecanoyl)]-4-hydr oxyprolinol Hyp-(N-acetylgalactosamine-alkyl)3
atcaactcctgaagttagaaa

SEQ ID NO: 3662 - RNA, 21 nt, synthetic construct
  misc_feature 1..21: note = Description of Artificial Sequence: Synthetic oligonucleotide
  source 1..21: mol_type = other RNA
  modified_base 1: mod_base = OTHER; note = 2'-O-methylcytidine-3'- phosphorothioate
  modified_base 2: mod_base = OTHER; note = 2'-O-methyluridine-3'-phosphorothioate
  modified_base 3: mod_base = OTHER; note = 2'-O-methylguanosine-3'-phosphate
  modified_base 4: mod_base = OTHER; note = 2'-O-methylguanosine-3'-phosphate
  modified_base 5: mod_base = OTHER; note = 2'-O-methyladenosine-3'-phosphate
  modified_base 6: mod_base = OTHER; note = 2'-O-methyluridine-3'-phosphate
  modified_base 7: mod_base = OTHER; note = 2'-fluoroguanosine-3'-phosphate
  modified_base 8: mod_base = OTHER; note = 2'-O-methylguanosine-3'-phosphate
  modified_base 9: mod_base = OTHER; note = 2'-fluorouridine-3'-phosphate
  modified_base 10: mod_base = OTHER; note = 2'-fluoroadenosine-3'-phosphate
  modified_base 11: mod_base = OTHER; note = 2'-fluorouridine-3'-phosphate
  modified_base 12: mod_base = OTHER; note = 2'-O-methyluridine-3'-phosphate
  modified_base 13: mod_base = OTHER; note = 2'-O-methyladenosine-3'-phosphate
  modified_base 14: mod_base = OTHER; note = 2'-O-methyladenosine-3'-phosphate
  modified_base 15: mod_base = OTHER; note = 2'-O-methyluridine-3'-phosphate
  modified_base 16: mod_base = OTHER; note = 2'-O-methylcytidine-3'-phosphate
  modified_base 17: mod_base = OTHER; note = 2'-O-methyluridine-3'-phosphate
  modified_base 18: mod_base = OTHER; note = 2'-O-methyluridine-3'-phosphate
  modified_base 19: mod_base = OTHER; note = 2'-O-methylguanosine-3'-phosphate
  modified_base 20: mod_base = OTHER; note = 2'-O-methyluridine-3'-phosphate
  modified_base 21: mod_base = OTHER; note = 2'-O-methyladenosine-3'-phosphate attached to N-[tris(N-acetylgalactosamine-alkyl)-amidodecanoyl)]-4-hydr oxyprolinol Hyp-(N-acetylgalactosamine-alkyl)3
ctggatggtattaatcttgta

SEQ ID NO: 3663 - RNA, 21 nt, synthetic construct
  misc_feature 1..21: note = Description of Artificial Sequence: Synthetic oligonucleotide
  source 1..21: mol_type = other RNA
  modified_base 1: mod_base = OTHER; note = 2'-O-methyluridine-3'-phosphorothioate
  modified_base 2: mod_base = OTHER; note = 2'-O-methyladenosine-3'- phosphorothioate
  modified_base 3: mod_base = OTHER; note = 2'-O-methyluridine-3'-phosphate
  modified_base 4: mod_base = OTHER; note = 2'-O-methylcytidine-3'-phosphate
  modified_base 5: mod_base = OTHER; note = 2'-O-methyladenosine-3'-phosphate
  modified_base 6: mod_base = OTHER; note = 2'-O-methyluridine-3'-phosphate
  modified_base 7: mod_base = OTHER; note = 2'-fluorouridine-3'-phosphate
  modified_base 8: mod_base = OTHER; note = 2'-O-methyluridine-3'-phosphate
  modified_base 9: mod_base = OTHER; note = 2'-fluorocytidine-3'-phosphate
  modified_base 10: mod_base = OTHER; note = 2'-fluoroadenosine-3'-phosphate
  modified_base 11: mod_base = OTHER; note = 2'-fluorocytidine-3'-phosphate
  modified_base 12: mod_base = OTHER; note = 2'-O-methyluridine-3'-phosphate
  modified_base 13: mod_base = OTHER; note = 2'-O-methylguanosine-3'-phosphate
  modified_base 14: mod_base = OTHER; note = 2'-O-methyluridine-3'-phosphate
  modified_base 15: mod_base = OTHER; note = 2'-O-methylcytidine-3'-phosphate
  modified_base 16: mod_base = OTHER; note = 2'-O-methyluridine-3'-phosphate
  modified_base 17: mod_base = OTHER; note = 2'-O-methyladenosine-3'-phosphate
  modified_base 18: mod_base = OTHER; note = 2'-O-methylguanosine-3'-phosphate
  modified_base 19: mod_base = OTHER; note = 2'-O-methylguanosine-3'-phosphate
  modified_base 20: mod_base = OTHER; note = 2'-O-methylcytidine-3'-phosphate
  modified_base 21: mod_base = OTHER; note = 2'-O-methyluridine-3'-phosphate attached to N-[tris(N-acetylgalactosamine-alkyl)-amidodecanoyl)]-4-hydr oxyprolinol Hyp-(N-acetylgalactosamine-alkyl)3
tatcatttcactgtctaggct

SEQ ID NO: 3664 - RNA, 21 nt, synthetic construct
  misc_feature 1..21: note = Description of Artificial Sequence: Synthetic oligonucleotide
  source 1..21: mol_type = other RNA
  modified_base 1: mod_base = OTHER; note = 2'-O-methylguanosine-3'- phosphorothioate
  modified_base 2: mod_base = OTHER; note = 2'-O-methyluridine-3'-phosphorothioate
  modified_base 3: mod_base = OTHER; note = 2'-O-methyladenosine-3'-phosphate
  modified_base 4: mod_base = OTHER; note = 2'-O-methyladenosine-3'-phosphate
  modified_base 5: mod_base = OTHER; note = 2'-O-methyladenosine-3'-phosphate
  modified_base 6: mod_base = OTHER; note = 2'-O-methyladenosine-3'-phosphate
  modified_base 7: mod_base = OTHER; note = 2'-fluorouridine-3'-phosphate
  modified_base 8: mod_base = OTHER; note = 2'-O-methylcytidine-3'-phosphate
  modified_base 9: mod_base = OTHER; note = 2'-fluorocytidine-3'-phosphate
  modified_base 10: mod_base = OTHER; note = 2'-fluoroadenosine-3'-phosphate
  modified_base 11: mod_base = OTHER; note = 2'-fluorocytidine-3'-phosphate
  modified_base 12: mod_base = OTHER; note = 2'-O-methyladenosine-3'-phosphate
  modified_base 13: mod_base = OTHER; note = 2'-O-methylguanosine-3'-phosphate
  modified_base 14: mod_base = OTHER; note = 2'-O-methylcytidine-3'-phosphate
  modified_base 15: mod_base = OTHER; note = 2'-O-methyluridine-3'-phosphate
  modified_base 16: mod_base = OTHER; note = 2'-O-methyladenosine-3'-phosphate
  modified_base 17: mod_base = OTHER; note = 2'-O-methyluridine-3'-phosphate
  modified_base 18: mod_base = OTHER; note = 2'-O-methyladenosine-3'-phosphate
  modified_base 19: mod_base = OTHER; note = 2'-O-methyluridine-3'-phosphate
  modified_base 20: mod_base = OTHER; note = 2'-O-methylcytidine-3'-phosphate
  modified_base 21: mod_base = OTHER; note = 2'-O-methyladenosine-3'-phosphate attached to N-[tris(N-acetylgalactosamine-alkyl)-amidodecanoyl)]-4-hydr oxyprolinol Hyp-(N-acetylgalactosamine-alkyl)3
gtaaaatccacagctatatca

SEQ ID NO: 3665 - RNA, 21 nt, synthetic construct
  misc_feature 1..21: note = Description of Artificial Sequence: Synthetic oligonucleotide
  source 1..21: mol_type = other RNA
  modified_base 1: mod_base = OTHER; note = 2'-O-methyluridine-3'-phosphorothioate
  modified_base 2: mod_base = OTHER; note = 2'-O-methylcytidine-3'- phosphorothioate
  modified_base 3: mod_base = OTHER; note = 2'-O-methylcytidine-3'-phosphate
  modified_base 4: mod_base = OTHER; note = 2'-O-methyluridine-3'-phosphate
  modified_base 5: mod_base = OTHER; note = 2'-O-methyluridine-3'-phosphate
  modified_base 6: mod_base = OTHER; note = 2'-O-methyladenosine-3'-phosphate
  modified_base 7: mod_base = OTHER; note = 2'-fluoroguanosine-3'-phosphate
  modified_base 8: mod_base = OTHER; note = 2'-O-methyluridine-3'-phosphate
  modified_base 9: mod_base = OTHER; note = 2'-fluoroguanosine-3'-phosphate
  modified_base 10: mod_base = OTHER; note = 2'-fluorouridine-3'-phosphate
  modified_base 11: mod_base = OTHER; note = 2'-fluorouridine-3'-phosphate
  modified_base 12: mod_base = OTHER; note = 2'-O-methylcytidine-3'-phosphate
  modified_base 13: mod_base = OTHER; note = 2'-O-methylcytidine-3'-phosphate
  modified_base 14: mod_base = OTHER; note = 2'-O-methyluridine-3'-phosphate
  modified_base 15: mod_base = OTHER; note = 2'-O-methyluridine-3'-phosphate
  modified_base 16: mod_base = OTHER; note = 2'-O-methylguanosine-3'-phosphate
  modified_base 17: mod_base = OTHER; note = 2'-O-methylcytidine-3'-phosphate
  modified_base 18: mod_base = OTHER; note = 2'-O-methyladenosine-3'-phosphate
  modified_base 19: mod_base = OTHER; note = 2'-O-methyluridine-3'-phosphate
  modified_base 20: mod_base = OTHER; note = 2'-O-methyluridine-3'-phosphate
  modified_base 21: mod_base = OTHER; note = 2'-O-methyluridine-3'-phosphate attached to N-[tris(N-acetylgalactosamine-alkyl)-amidodecanoyl)]-4-hydr oxyprolinol Hyp-(N-acetylgalactosamine-alkyl)3
tccttagtgttccttgcattt

SEQ ID NO: 3666 - RNA, 21 nt, synthetic construct
  misc_feature 1..21: note = Description of Artificial Sequence: Synthetic oligonucleotide
  source 1..21: mol_type = other RNA
  modified_base 1: mod_base = OTHER; note = 2'-O-methylcytidine-3'- phosphorothioate
  modified_base 2: mod_base = OTHER; note = 2'-O-methyladenosine-3'- phosphorothioate
  modified_base 3: mod_base = OTHER; note = 2'-O-methyluridine-3'-phosphate
  modified_base 4: mod_base = OTHER; note = 2'-O-methyladenosine-3'-phosphate
  modified_base 5: mod_base = OTHER; note = 2'-O-methyluridine-3'-phosphate
  modified_base 6: mod_base = OTHER; note = 2'-O-methylcytidine-3'-phosphate
  modified_base 7: mod_base = OTHER; note = 2'-fluoroadenosine-3'-phosphate
  modified_base 8: mod_base = OTHER; note = 2'-O-methyluridine-3'-phosphate
  modified_base 9: mod_base = OTHER; note = 2'-fluorouridine-3'-phosphate
  modified_base 10: mod_base = OTHER; note = 2'-fluorouridine-3'-phosphate
  modified_base 11: mod_base = OTHER; note = 2'-fluorocytidine-3'-phosphate
  modified_base 12: mod_base = OTHER; note = 2'-O-methyladenosine-3'-phosphate
  modified_base 13: mod_base = OTHER; note = 2'-O-methylcytidine-3'-phosphate
  modified_base 14: mod_base = OTHER; note = 2'-O-methyluridine-3'-phosphate
  modified_base 15: mod_base = OTHER; note = 2'-O-methylguanosine-3'-phosphate
  modified_base 16: mod_base = OTHER; note = 2'-O-methyluridine-3'-phosphate
  modified_base 17: mod_base = OTHER; note = 2'-O-methylcytidine-3'-phosphate
  modified_base 18: mod_base = OTHER; note = 2'-O-methyluridine-3'-phosphate
  modified_base 19: mod_base = OTHER; note = 2'-O-methyladenosine-3'-phosphate
  modified_base 20: mod_base = OTHER; note = 2'-O-methylguanosine-3'-phosphate
  modified_base 21: mod_base = OTHER; note = 2'-O-methyladenosine-3'-phosphate attached to N-[tris(N-acetylgalactosamine-alkyl)-amidodecanoyl)]-4-hydr oxyprolinol Hyp-(N-acetylgalactosamine-alkyl)3
catatcatttcactgtctaga

SEQ ID NO: 3667 - RNA, 21 nt, synthetic construct
  misc_feature 1..21: note = Description of Artificial Sequence: Synthetic oligonucleotide
  source 1..21: mol_type = other RNA
  modified_base 1: mod_base = OTHER; note = 2'-O-methyladenosine-3'- phosphorothioate
  modified_base 2: mod_base = OTHER; note = 2'-O-methyladenosine-3'- phosphorothioate
  modified_base 3: mod_base = OTHER; note = 2'-O-methylcytidine-3'-phosphate
  modified_base 4: mod_base = OTHER; note = 2'-O-methyladenosine-3'-phosphate
  modified_base 5: mod_base = OTHER; note = 2'-O-methyluridine-3'-phosphate
  modified_base 6: mod_base = OTHER; note = 2'-O-methylcytidine-3'-phosphate
  modified_base 7: mod_base = OTHER; note = 2'-fluoroadenosine-3'-phosphate
  modified_base 8: mod_base = OTHER; note = 2'-O-methyladenosine-3'-phosphate
  modified_base 9: mod_base = OTHER; note = 2'-fluorocytidine-3'-phosphate
  modified_base 10: mod_base = OTHER; note = 2'-fluorouridine-3'-phosphate
  modified_base 11: mod_base = OTHER; note = 2'-fluorocytidine-3'-phosphate
  modified_base 12: mod_base = OTHER; note = 2'-O-methylcytidine-3'-phosphate
  modified_base 13: mod_base = OTHER; note = 2'-O-methyluridine-3'-phosphate
  modified_base 14: mod_base = OTHER; note = 2'-O-methylguanosine-3'-phosphate
  modified_base 15: mod_base = OTHER; note = 2'-O-methyladenosine-3'-phosphate
  modified_base 16: mod_base = OTHER; note = 2'-O-methyladenosine-3'-phosphate
  modified_base 17: mod_base = OTHER; note = 2'-O-methylguanosine-3'-phosphate
  modified_base 18: mod_base = OTHER; note = 2'-O-methyluridine-3'-phosphate
  modified_base 19: mod_base = OTHER; note = 2'-O-methyluridine-3'-phosphate
  modified_base 20: mod_base = OTHER; note = 2'-O-methyladenosine-3'-phosphate
  modified_base 21: mod_base = OTHER; note = 2'-O-methyladenosine-3'-phosphate attached to N-[tris(N-acetylgalactosamine-alkyl)-amidodecanoyl)]-4-hydr oxyprolinol Hyp-(N-acetylgalactosamine-alkyl)3
aacatcaactcctgaagttaa

SEQ ID NO: 3668 - RNA, 21 nt, synthetic construct
  misc_feature 1..21: note = Description of Artificial Sequence: Synthetic oligonucleotide
  source 1..21: mol_type = other RNA
  modified_base 1: mod_base = OTHER; note = 2'-O-methylcytidine-3'- phosphorothioate
  modified_base 2: mod_base = OTHER; note = 2'-O-methylcytidine-3'- phosphorothioate
  modified_base 3: mod_base = OTHER; note = 2'-O-methyluridine-3'-phosphate
  modified_base 4: mod_base = OTHER; note = 2'-O-methylguanosine-3'-phosphate
  modified_base 5: mod_base = OTHER; note = 2'-O-methyladenosine-3'-phosphate
  modified_base 6: mod_base = OTHER; note = 2'-O-methyluridine-3'-phosphate
  modified_base 7: mod_base = OTHER; note = 2'-fluoroguanosine-3'-phosphate
  modified_base 8: mod_base = OTHER; note = 2'-O-methylcytidine-3'-phosphate
  modified_base 9: mod_base = OTHER; note = 2'-fluorouridine-3'-phosphate
  modified_base 10: mod_base = OTHER; note = 2'-fluoroguanosine-3'-phosphate
  modified_base 11: mod_base = OTHER; note = 2'-fluoroguanosine-3'-phosphate
  modified_base 12: mod_base = OTHER; note = 2'-O-methyladenosine-3'-phosphate
  modified_base 13: mod_base = OTHER; note = 2'-O-methyluridine-3'-phosphate
  modified_base 14: mod_base = OTHER; note = 2'-O-methylguanosine-3'-phosphate
  modified_base 15: mod_base = OTHER; note = 2'-O-methylguanosine-3'-phosphate
  modified_base 16: mod_base = OTHER; note = 2'-O-methyluridine-3'-phosphate
  modified_base 17: mod_base = OTHER; note = 2'-O-methyladenosine-3'-phosphate
  modified_base 18: mod_base = OTHER; note = 2'-O-methyluridine-3'-phosphate
  modified_base 19: mod_base = OTHER; note = 2'-O-methyluridine-3'-phosphate
  modified_base 20: mod_base = OTHER; note = 2'-O-methyladenosine-3'-phosphate
  modified_base 21: mod_base = OTHER; note = 2'-O-methyladenosine-3'-phosphate attached to N-[tris(N-acetylgalactosamine-alkyl)-amidodecanoyl)]-4-hydr oxyprolinol Hyp-(N-acetylgalactosamine-alkyl)3
cctgatgctggatggtattaa

SEQ ID NO: 3669 - RNA, 21 nt, synthetic construct
  misc_feature 1..21: note = Description of Artificial Sequence: Synthetic oligonucleotide
  source 1..21: mol_type = other RNA
  modified_base 1: mod_base = OTHER; note = 2'-O-methyladenosine-3'- phosphorothioate
  modified_base 2: mod_base = OTHER; note = 2'-O-methyladenosine-3'- phosphorothioate
  modified_base 3: mod_base = OTHER; note = 2'-O-methyluridine-3'-phosphate
  modified_base 4: mod_base = OTHER; note = 2'-O-methylguanosine-3'-phosphate
  modified_base 5: mod_base = OTHER; note = 2'-O-methylcytidine-3'-phosphate
  modified_base 6: mod_base = OTHER; note = 2'-O-methyladenosine-3'-phosphate
  modified_base 7: mod_base = OTHER; note = 2'-fluoroadenosine-3'-phosphate
  modified_base 8: mod_base = OTHER; note = 2'-O-methylcytidine-3'-phosphate
  modified_base 9: mod_base = OTHER; note = 2'-fluorocytidine-3'-phosphate
  modified_base 10: mod_base = OTHER; note = 2'-fluoroadenosine-3'-phosphate
  modified_base 11: mod_base = OTHER; note = 2'-fluoroadenosine-3'-phosphate
  modified_base 12: mod_base = OTHER; note = 2'-O-methylcytidine-3'-phosphate
  modified_base 13: mod_base = OTHER; note = 2'-O-methyluridine-3'-phosphate
  modified_base 14: mod_base = OTHER; note = 2'-O-methyladenosine-3'-phosphate
  modified_base 15: mod_base = OTHER; note = 2'-O-methyluridine-3'-phosphate
  modified_base 16: mod_base = OTHER; note = 2'-O-methylcytidine-3'-phosphate
  modified_base 17: mod_base = OTHER; note = 2'-O-methylcytidine-3'-phosphate
  modified_base 18: mod_base = OTHER; note = 2'-O-methyladenosine-3'-phosphate
  modified_base 19: mod_base = OTHER; note = 2'-O-methyladenosine-3'-phosphate
  modified_base 20: mod_base = OTHER; note = 2'-O-methylguanosine-3'-phosphate
  modified_base 21: mod_base = OTHER; note = 2'-O-methyluridine-3'-phosphate attached to N-[tris(N-acetylgalactosamine-alkyl)-amidodecanoyl)]-4-hydr oxyprolinol Hyp-(N-acetylgalactosamine-alkyl)3
aatgcaaccaactatccaagt

SEQ ID NO: 3670 - RNA, 21 nt, synthetic construct
  misc_feature 1..21: note = Description of Artificial Sequence: Synthetic oligonucleotide
  source 1..21: mol_type = other RNA
  modified_base 1: mod_base = OTHER; note = 2'-O-methyluridine-3'-phosphorothioate
  modified_base 2: mod_base = OTHER; note = 2'-O-methyluridine-3'-phosphorothioate
  modified_base 3: mod_base = OTHER; note = 2'-O-methyluridine-3'-phosphate
  modified_base 4: mod_base = OTHER; note = 2'-O-methyladenosine-3'-phosphate
  modified_base 5: mod_base = OTHER; note = 2'-O-methylcytidine-3'-phosphate
  modified_base 6: mod_base = OTHER; note = 2'-O-methylguanosine-3'-phosphate
  modified_base 7: mod_base = OTHER; note = 2'-fluoroguanosine-3'-phosphate
  modified_base 8: mod_base = OTHER; note = 2'-O-methyladenosine-3'-phosphate
  modified_base 9: mod_base = OTHER; note = 2'-fluoroadenosine-3'-phosphate
  modified_base 10: mod_base = OTHER; note = 2'-fluorouridine-3'-phosphate
  modified_base 11: mod_base = OTHER; note = 2'-fluoroadenosine-3'-phosphate
  modified_base 12: mod_base = OTHER; note = 2'-O-methyladenosine-3'-phosphate
  modified_base 13: mod_base = OTHER; note = 2'-O-methyladenosine-3'-phosphate
  modified_base 14: mod_base = OTHER; note = 2'-O-methylguanosine-3'-phosphate
  modified_base 15: mod_base = OTHER; note = 2'-O-methylguanosine-3'-phosphate
  modified_base 16: mod_base = OTHER; note = 2'-O-methyladenosine-3'-phosphate
  modified_base 17: mod_base = OTHER; note = 2'-O-methyluridine-3'-phosphate
  modified_base 18: mod_base = OTHER; note = 2'-O-methylguanosine-3'-phosphate
  modified_base 19: mod_base = OTHER; note = 2'-O-methyladenosine-3'-phosphate
  modified_base 20: mod_base = OTHER; note = 2'-O-methyluridine-3'-phosphate
  modified_base 21: mod_base = OTHER; note = 2'-O-methyladenosine-3'-phosphate attached to N-[tris(N-acetylgalactosamine-alkyl)-amidodecanoyl)]-4-hydr oxyprolinol Hyp-(N-acetylgalactosamine-alkyl)3
tttacggaataaaggatgata

SEQ ID NO: 3671 - RNA, 21 nt, synthetic construct
  misc_feature 1..21: note = Description of Artificial Sequence: Synthetic oligonucleotide
  source 1..21: mol_type = other RNA
  modified_base 1: mod_base = OTHER; note = 2'-O-methyluridine-3'-phosphorothioate
  modified_base 2: mod_base = OTHER; note = 2'-O-methyluridine-3'-phosphorothioate
  modified_base 3: mod_base = OTHER; note = 2'-O-methylcytidine-3'-phosphate
  modified_base 4: mod_base = OTHER; note = 2'-O-methylcytidine-3'-phosphate
  modified_base 5: mod_base = OTHER; note = 2'-O-methyluridine-3'-phosphate
  modified_base 6: mod_base = OTHER; note = 2'-O-methyluridine-3'-phosphate
  modified_base 7: mod_base = OTHER; note = 2'-fluoroadenosine-3'-phosphate
  modified_base 8: mod_base = OTHER; note = 2'-O-methylguanosine-3'-phosphate
  modified_base 9: mod_base = OTHER; note = 2'-fluorouridine-3'-phosphate
  modified_base 10: mod_base = OTHER; note = 2'-fluoroguanosine-3'-phosphate
  modified_base 11: mod_base = OTHER; note = 2'-fluorouridine-3'-phosphate
  modified_base 12: mod_base = OTHER; note = 2'-O-methyluridine-3'-phosphate
  modified_base 13: mod_base = OTHER; note = 2'-O-methylcytidine-3'-phosphate
  modified_base 14: mod_base = OTHER; note = 2'-O-methylcytidine-3'-phosphate
  modified_base 15: mod_base = OTHER; note = 2'-O-methyluridine-3'-phosphate
  modified_base 16: mod_base = OTHER; note = 2'-O-methyluridine-3'-phosphate
  modified_base 17: mod_base = OTHER; note = 2'-O-methylguanosine-3'-phosphate
  modified_base 18: mod_base = OTHER; note = 2'-O-methylcytidine-3'-phosphate
  modified_base 19: mod_base = OTHER; note = 2'-O-methyladenosine-3'-phosphate
  modified_base 20: mod_base = OTHER; note = 2'-O-methyluridine-3'-phosphate
  modified_base 21: mod_base = OTHER; note = 2'-O-methyluridine-3'-phosphate attached to N-[tris(N-acetylgalactosamine-alkyl)-amidodecanoyl)]-4-hydr oxyprolinol Hyp-(N-acetylgalactosamine-alkyl)3
ttccttagtgttccttgcatt

SEQ ID NO: 3672 - RNA, 21 nt, synthetic construct
  misc_feature 1..21: note = Description of Artificial Sequence: Synthetic oligonucleotide
  source 1..21: mol_type = other RNA
  modified_base 1: mod_base = OTHER; note = 2'-O-methylcytidine-3'- phosphorothioate
  modified_base 2: mod_base = OTHER; note = 2'-O-methyladenosine-3'- phosphorothioate
  modified_base 3: mod_base = OTHER; note = 2'-O-methyladenosine-3'-phosphate
  modified_base 4: mod_base = OTHER; note = 2'-O-methyluridine-3'-phosphate
  modified_base 5: mod_base = OTHER; note = 2'-O-methylguanosine-3'-phosphate
  modified_base 6: mod_base = OTHER; note = 2'-O-methylcytidine-3'-phosphate
  modified_base 7: mod_base = OTHER; note = 2'-fluoroadenosine-3'-phosphate
  modified_base 8: mod_base = OTHER; note = 2'-O-methyladenosine-3'-phosphate
  modified_base 9: mod_base = OTHER; note = 2'-fluorocytidine-3'-phosphate
  modified_base 10: mod_base = OTHER; note = 2'-fluorocytidine-3'-phosphate
  modified_base 11: mod_base = OTHER; note = 2'-fluoroadenosine-3'-phosphate
  modified_base 12: mod_base = OTHER; note = 2'-O-methyladenosine-3'-phosphate
  modified_base 13: mod_base = OTHER; note = 2'-O-methylcytidine-3'-phosphate
  modified_base 14: mod_base = OTHER; note = 2'-O-methyluridine-3'-phosphate
  modified_base 15: mod_base = OTHER; note = 2'-O-methyladenosine-3'-phosphate
  modified_base 16: mod_base = OTHER; note = 2'-O-methyluridine-3'-phosphate
  modified_base 17: mod_base = OTHER; note = 2'-O-methylcytidine-3'-phosphate
  modified_base 18: mod_base = OTHER; note = 2'-O-methylcytidine-3'-phosphate
  modified_base 19: mod_base = OTHER; note = 2'-O-methyladenosine-3'-phosphate
  modified_base 20: mod_base = OTHER; note = 2'-O-methyladenosine-3'-phosphate
  modified_base 21: mod_base = OTHER; note = 2'-O-methyladenosine-3'-phosphate attached to N-[tris(N-acetylgalactosamine-alkyl)-amidodecanoyl)]-4-hydr oxyprolinol Hyp-(N-acetylgalactosamine-alkyl)3
caatgcaaccaactatccaaa

SEQ ID NO: 3673 - RNA, 21 nt, synthetic construct
  misc_feature 1..21: note = Description of Artificial Sequence: Synthetic oligonucleotide
  source 1..21: mol_type = other RNA
  modified_base 1: mod_base = OTHER; note = 2'-O-methyladenosine-3'- phosphorothioate
  modified_base 2: mod_base = OTHER; note = 2'-O-methylguanosine-3'- phosphorothioate
  modified_base 3: mod_base = OTHER; note = 2'-O-methyladenosine-3'-phosphate
  modified_base 4: mod_base = OTHER; note = 2'-O-methyluridine-3'-phosphate
  modified_base 5: mod_base = OTHER; note = 2'-O-methyluridine-3'-phosphate
  modified_base 6: mod_base = OTHER; note = 2'-O-methyluridine-3'-phosphate
  modified_base 7: mod_base = OTHER; note = 2'-fluoroguanosine-3'-phosphate
  modified_base 8: mod_base = OTHER; note = 2'-O-methylguanosine-3'-phosphate
  modified_base 9: mod_base = OTHER; note = 2'-fluorocytidine-3'-phosphate
  modified_base 10: mod_base = OTHER; note = 2'-fluoroadenosine-3'-phosphate
  modified_base 11: mod_base = OTHER; note = 2'-fluoroguanosine-3'-phosphate
  modified_base 12: mod_base = OTHER; note = 2'-O-methyladenosine-3'-phosphate
  modified_base 13: mod_base = OTHER; note = 2'-O-methylguanosine-3'-phosphate
  modified_base 14: mod_base = OTHER; note = 2'-O-methyladenosine-3'-phosphate
  modified_base 15: mod_base = OTHER; note = 2'-O-methylguanosine-3'-phosphate
  modified_base 16: mod_base = OTHER; note = 2'-O-methyluridine-3'-phosphate
  modified_base 17: mod_base = OTHER; note = 2'-O-methyladenosine-3'-phosphate
  modified_base 18: mod_base = OTHER; note = 2'-O-methyluridine-3'-phosphate
  modified_base 19: mod_base = OTHER; note = 2'-O-methyladenosine-3'-phosphate
  modified_base 20: mod_base = OTHER; note = 2'-O-methyladenosine-3'-phosphate
  modified_base 21: mod_base = OTHER; note = 2'-O-methyluridine-3'-phosphate attached to N-[tris(N-acetylgalactosamine-alkyl)-amidodecanoyl)]-4-hydr oxyprolinol Hyp-(N-acetylgalactosamine-alkyl)3
agatttggcagagagtataat

SEQ ID NO: 3674 - RNA, 21 nt, synthetic construct
  misc_feature 1..21: note = Description of Artificial Sequence: Synthetic oligonucleotide
  source 1..21: mol_type = other RNA
  modified_base 1: mod_base = OTHER; note = 2'-O-methyluridine-3'-phosphorothioate
  modified_base 2: mod_base = OTHER; note = 2'-O-methyluridine-3'-phosphorothioate
  modified_base 3: mod_base = OTHER; note = 2'-O-methyluridine-3'-phosphate
  modified_base 4: mod_base = OTHER; note = 2'-O-methylcytidine-3'-phosphate
  modified_base 5: mod_base = OTHER; note = 2'-O-methylcytidine-3'-phosphate
  modified_base 6: mod_base = OTHER; note = 2'-O-methyladenosine-3'-phosphate
  modified_base 7: mod_base = OTHER; note = 2'-fluorocytidine-3'-phosphate
  modified_base 8: mod_base = OTHER; note = 2'-O-methylcytidine-3'-phosphate
  modified_base 9: mod_base = OTHER; note = 2'-fluoroadenosine-3'-phosphate
  modified_base 10: mod_base = OTHER; note = 2'-fluorouridine-3'-phosphate
  modified_base 11: mod_base = OTHER; note = 2'-fluoroguanosine-3'-phosphate
  modified_base 12: mod_base = OTHER; note = 2'-O-methyladenosine-3'-phosphate
  modified_base 13: mod_base = OTHER; note = 2'-O-methyluridine-3'-phosphate
  modified_base 14: mod_base = OTHER; note = 2'-O-methyluridine-3'-phosphate
  modified_base 15: mod_base = OTHER; note = 2'-O-methyladenosine-3'-phosphate
  modified_base 16: mod_base = OTHER; note = 2'-O-methyladenosine-3'-phosphate
  modified_base 17: mod_base = OTHER; note = 2'-O-methylguanosine-3'-phosphate
  modified_base 18: mod_base = OTHER; note = 2'-O-methylguanosine-3'-phosphate
  modified_base 19: mod_base = OTHER; note = 2'-O-methylguanosine-3'-phosphate
  modified_base 20: mod_base = OTHER; note = 2'-O-methyluridine-3'-phosphate
  modified_base 21: mod_base = OTHER; note = 2'-O-methyladenosine-3'-phosphate attached to N-[tris(N-acetylgalactosamine-alkyl)-amidodecanoyl)]-4-hydr oxyprolinol Hyp-(N-acetylgalactosamine-alkyl)3
tttccaccatgattaagggta

SEQ ID NO: 3675 - RNA, 21 nt, synthetic construct
  misc_feature 1..21: note = Description of Artificial Sequence: Synthetic oligonucleotide
  source 1..21: mol_type = other RNA
  modified_base 1: mod_base = OTHER; note = 2'-O-methyladenosine-3'- phosphorothioate
  modified_base 2: mod_base = OTHER; note = 2'-O-methylcytidine-3'- phosphorothioate
  modified_base 3: mod_base = OTHER; note = 2'-O-methyluridine-3'-phosphate
  modified_base 4: mod_base = OTHER; note = 2'-O-methylguanosine-3'-phosphate
  modified_base 5: mod_base = OTHER; note = 2'-O-methylguanosine-3'-phosphate
  modified_base 6: mod_base = OTHER; note = 2'-O-methyluridine-3'-phosphate
  modified_base 7: mod_base = OTHER; note = 2'-fluorouridine-3'-phosphate
  modified_base 8: mod_base = OTHER; note = 2'-O-methyladenosine-3'-phosphate
  modified_base 9: mod_base = OTHER; note = 2'-fluoroguanosine-3'-phosphate
  modified_base 10: mod_base = OTHER; note = 2'-fluorouridine-3'-phosphate
  modified_base 11: mod_base = OTHER; note = 2'-fluoroguanosine-3'-phosphate
  modified_base 12: mod_base = OTHER; note = 2'-O-methyluridine-3'-phosphate
  modified_base 13: mod_base = OTHER; note = 2'-O-methylguanosine-3'-phosphate
  modified_base 14: mod_base = OTHER; note = 2'-O-methyladenosine-3'-phosphate
  modified_base 15: mod_base = OTHER; note = 2'-O-methyladenosine-3'-phosphate
  modified_base 16: mod_base = OTHER; note = 2'-O-methyladenosine-3'-phosphate
  modified_base 17: mod_base = OTHER; note = 2'-O-methyluridine-3'-phosphate
  modified_base 18: mod_base = OTHER; note = 2'-O-methyladenosine-3'-phosphate
  modified_base 19: mod_base = OTHER; note = 2'-O-methylguanosine-3'-phosphate
  modified_base 20: mod_base = OTHER; note = 2'-O-methyluridine-3'-phosphate
  modified_base 21: mod_base = OTHER; note = 2'-O-methyluridine-3'-phosphate attached to N-[tris(N-acetylgalactosamine-alkyl)-amidodecanoyl)]-4-hydr oxyprolinol Hyp-(N-acetylgalactosamine-alkyl)3
actggttagtgtgaaatagtt

SEQ ID NO: 3676 - RNA, 21 nt, synthetic construct
  misc_feature 1..21: note = Description of Artificial Sequence: Synthetic oligonucleotide
  source 1..21: mol_type = other RNA
  modified_base 1: mod_base = OTHER; note = 2'-O-methylcytidine-3'- phosphorothioate
  modified_base 2: mod_base = OTHER; note = 2'-O-methyladenosine-3'- phosphorothioate
  modified_base 3: mod_base = OTHER; note = 2'-O-methyladenosine-3'-phosphate
  modified_base 4: mod_base = OTHER; note = 2'-O-methylguanosine-3'-phosphate
  modified_base 5: mod_base = OTHER; note = 2'-O-methyluridine-3'-phosphate
  modified_base 6: mod_base = OTHER; note = 2'-O-methylcytidine-3'-phosphate
  modified_base 7: mod_base = OTHER; note = 2'-fluorocytidine-3'-phosphate
  modified_base 8: mod_base = OTHER; note = 2'-O-methyladenosine-3'-phosphate
  modified_base 9: mod_base = OTHER; note = 2'-fluoroadenosine-3'-phosphate
  modified_base 10: mod_base = OTHER; note = 2'-fluorouridine-3'-phosphate
  modified_base 11: mod_base = OTHER; note = 2'-fluoroadenosine-3'-phosphate
  modified_base 12: mod_base = OTHER; note = 2'-O-methyluridine-3'-phosphate
  modified_base 13: mod_base = OTHER; note = 2'-O-methylguanosine-3'-phosphate
  modified_base 14: mod_base = OTHER; note = 2'-O-methylguanosine-3'-phosphate
  modified_base 15: mod_base = OTHER; note = 2'-O-methylcytidine-3'-phosphate
  modified_base 16: mod_base = OTHER; note = 2'-O-methyladenosine-3'-phosphate
  modified_base 17: mod_base = OTHER; note = 2'-O-methyladenosine-3'-phosphate
  modified_base 18: mod_base = OTHER; note = 2'-O-methylcytidine-3'-phosphate
  modified_base 19: mod_base = OTHER; note = 2'-O-methyluridine-3'-phosphate
  modified_base 20: mod_base = OTHER; note = 2'-O-methylcytidine-3'-phosphate
  modified_base 21: mod_base = OTHER; note = 2'-O-methyluridine-3'-phosphate attached to N-[tris(N-acetylgalactosamine-alkyl)-amidodecanoyl)]-4-hydr oxyprolinol Hyp-(N-acetylgalactosamine-alkyl)3
caagtccaatatggcaactct

SEQ ID NO: 3677 - RNA, 21 nt, synthetic construct
  misc_feature 1..21: note = Description of Artificial Sequence: Synthetic oligonucleotide
  source 1..21: mol_type = other RNA
  modified_base 1: mod_base = OTHER; note = 2'-O-methyluridine-3'-phosphorothioate
  modified_base 2: mod_base = OTHER; note = 2'-O-methylcytidine-3'- phosphorothioate
  modified_base 3: mod_base = OTHER; note = 2'-O-methylcytidine-3'-phosphate
  modified_base 4: mod_base = OTHER; note = 2'-O-methyladenosine-3'-phosphate
  modified_base 5: mod_base = OTHER; note = 2'-O-methylcytidine-3'-phosphate
  modified_base 6: mod_base = OTHER; note = 2'-O-methylcytidine-3'-phosphate
  modified_base 7: mod_base = OTHER; note = 2'-fluoroadenosine-3'-phosphate
  modified_base 8: mod_base = OTHER; note = 2'-O-methyluridine-3'-phosphate
  modified_base 9: mod_base = OTHER; note = 2'-fluoroguanosine-3'-phosphate
  modified_base 10: mod_base = OTHER; note = 2'-fluoroadenosine-3'-phosphate
  modified_base 11: mod_base = OTHER; note = 2'-fluorouridine-3'-phosphate
  modified_base 12: mod_base = OTHER; note = 2'-O-methyluridine-3'-phosphate
  modified_base 13: mod_base = OTHER; note = 2'-O-methyladenosine-3'-phosphate
  modified_base 14: mod_base = OTHER; note = 2'-O-methyladenosine-3'-phosphate
  modified_base 15: mod_base = OTHER; note = 2'-O-methylguanosine-3'-phosphate
  modified_base 16: mod_base = OTHER; note = 2'-O-methylguanosine-3'-phosphate
  modified_base 17: mod_base = OTHER; note = 2'-O-methylguanosine-3'-phosphate
  modified_base 18: mod_base = OTHER; note = 2'-O-methyluridine-3'-phosphate
  modified_base 19: mod_base = OTHER; note = 2'-O-methylcytidine-3'-phosphate
  modified_base 20: mod_base = OTHER; note = 2'-O-methyluridine-3'-phosphate
  modified_base 21: mod_base = OTHER; note = 2'-O-methyluridine-3'-phosphate attached to N-[tris(N-acetylgalactosamine-alkyl)-amidodecanoyl)]-4-hydr oxyprolinol Hyp-(N-acetylgalactosamine-alkyl)3
tccaccatgattaagggtctt

SEQ ID NO: 3678 - RNA, 21 nt, synthetic construct
  misc_feature 1..21: note = Description of Artificial Sequence: Synthetic oligonucleotide
  source 1..21: mol_type = other RNA
  modified_base 1: mod_base = OTHER; note = 2'-O-methyluridine-3'-phosphorothioate
  modified_base 2: mod_base = OTHER; note = 2'-O-methylcytidine-3'- phosphorothioate
  modified_base 3: mod_base = OTHER; note = 2'-O-methyladenosine-3'-phosphate
  modified_base 4: mod_base = OTHER; note = 2'-O-methyluridine-3'-phosphate
  modified_base 5: mod_base = OTHER; note = 2'-O-methyluridine-3'-phosphate
  modified_base 6: mod_base = OTHER; note = 2'-O-methyluridine-3'-phosphate
  modified_base 7: mod_base = OTHER; note = 2'-fluorocytidine-3'-phosphate
  modified_base 8: mod_base = OTHER; note = 2'-O-methyladenosine-3'-phosphate
  modified_base 9: mod_base = OTHER; note = 2'-fluorocytidine-3'-phosphate
  modified_base 10: mod_base = OTHER; note = 2'-fluorouridine-3'-phosphate
  modified_base 11: mod_base = OTHER; note = 2'-fluoroguanosine-3'-phosphate
  modified_base 12: mod_base = OTHER; note = 2'-O-methyluridine-3'-phosphate
  modified_base 13: mod_base = OTHER; note = 2'-O-methylcytidine-3'-phosphate
  modified_base 14: mod_base = OTHER; note = 2'-O-methyluridine-3'-phosphate
  modified_base 15: mod_base = OTHER; note = 2'-O-methyladenosine-3'-phosphate
  modified_base 16: mod_base = OTHER; note = 2'-O-methylguanosine-3'-phosphate
  modified_base 17: mod_base = OTHER; note = 2'-O-methylguanosine-3'-phosphate
  modified_base 18: mod_base = OTHER; note = 2'-O-methylcytidine-3'-phosphate
  modified_base 19: mod_base = OTHER; note = 2'-O-methyluridine-3'-phosphate
  modified_base 20: mod_base = OTHER; note = 2'-O-methyladenosine-3'-phosphate
  modified_base 21: mod_base = OTHER; note = 2'-O-methyladenosine-3'-phosphate attached to N-[tris(N-acetylgalactosamine-alkyl)-amidodecanoyl)]-4-hydr oxyprolinol Hyp-(N-acetylgalactosamine-alkyl)3
tcatttcactgtctaggctaa

SEQ ID NO: 3679 - RNA, 21 nt, synthetic construct
  misc_feature 1..21: note = Description of Artificial Sequence: Synthetic oligonucleotide
  source 1..21: mol_type = other RNA
  modified_base 1: mod_base = OTHER; note = 2'-O-methyluridine-3'-phosphorothioate
  modified_base 2: mod_base = OTHER; note = 2'-O-methylguanosine-3'- phosphorothioate
  modified_base 3: mod_base = OTHER; note = 2'-O-methyluridine-3'-phosphate
  modified_base 4: mod_base = OTHER; note = 2'-O-methylcytidine-3'-phosphate
  modified_base 5: mod_base = OTHER; note = 2'-O-methylcytidine-3'-phosphate
  modified_base 6: mod_base = OTHER; note = 2'-O-methyluridine-3'-phosphate
  modified_base 7: mod_base = OTHER; note = 2'-fluorouridine-3'-phosphate
  modified_base 8: mod_base = OTHER; note = 2'-O-methyluridine-3'-phosphate
  modified_base 9: mod_base = OTHER; note = 2'-fluorouridine-3'-phosphate
  modified_base 10: mod_base = OTHER; note = 2'-fluorouridine-3'-phosphate
  modified_base 11: mod_base = OTHER; note = 2'-fluoroadenosine-3'-phosphate
  modified_base 12: mod_base = OTHER; note = 2'-O-methyluridine-3'-phosphate
  modified_base 13: mod_base = OTHER; note = 2'-O-methylcytidine-3'-phosphate
  modified_base 14: mod_base = OTHER; note = 2'-O-methyluridine-3'-phosphate
  modified_base 15: mod_base = OTHER; note = 2'-O-methylguanosine-3'-phosphate
  modified_base 16: mod_base = OTHER; note = 2'-O-methyladenosine-3'-phosphate
  modified_base 17: mod_base = OTHER; note = 2'-O-methyluridine-3'-phosphate
  modified_base 18: mod_base = OTHER; note = 2'-O-methylcytidine-3'-phosphate
  modified_base 19: mod_base = OTHER; note = 2'-O-methyluridine-3'-phosphate
  modified_base 20: mod_base = OTHER; note = 2'-O-methylguanosine-3'-phosphate
  modified_base 21: mod_base = OTHER; note = 2'-O-methyluridine-3'-phosphate attached to N-[tris(N-acetylgalactosamine-alkyl)-amidodecanoyl)]-4-hydr oxyprolinol Hyp-(N-acetylgalactosamine-alkyl)3
tgtcctttttatctgatctgt

SEQ ID NO: 3680 - RNA, 21 nt, synthetic construct
  misc_feature 1..21: note = Description of Artificial Sequence: Synthetic oligonucleotide
  source 1..21: mol_type = other RNA
  modified_base 1: mod_base = OTHER; note = 2'-O-methylcytidine-3'- phosphorothioate
  modified_base 2: mod_base = OTHER; note = 2'-O-methylcytidine-3'- phosphorothioate
  modified_base 3: mod_base = OTHER; note = 2'-O-methyladenosine-3'-phosphate
  modified_base 4: mod_base = OTHER; note = 2'-O-methylguanosine-3'-phosphate
  modified_base 5: mod_base = OTHER; note = 2'-O-methyluridine-3'-phosphate
  modified_base 6: mod_base = OTHER; note = 2'-O-methylguanosine-3'-phosphate
  modified_base 7: mod_base = OTHER; note = 2'-fluorouridine-3'-phosphate
  modified_base 8: mod_base = OTHER; note = 2'-O-methyladenosine-3'-phosphate
  modified_base 9: mod_base = OTHER; note = 2'-fluorouridine-3'-phosphate
  modified_base 10: mod_base = OTHER; note = 2'-fluoroadenosine-3'-phosphate
  modified_base 11: mod_base = OTHER; note = 2'-fluoroadenosine-3'-phosphate
  modified_base 12: mod_base = OTHER; note = 2'-O-methyladenosine-3'-phosphate
  modified_base 13: mod_base = OTHER; note = 2'-O-methyluridine-3'-phosphate
  modified_base 14: mod_base = OTHER; note = 2'-O-methylcytidine-3'-phosphate
  modified_base 15: mod_base = OTHER; note = 2'-O-methylcytidine-3'-phosphate
  modified_base 16: mod_base = OTHER; note = 2'-O-methyladenosine-3'-phosphate
  modified_base 17: mod_base = OTHER; note = 2'-O-methyladenosine-3'-phosphate
  modified_base 18: mod_base = OTHER; note = 2'-O-methyluridine-3'-phosphate
  modified_base 19: mod_base = OTHER; note = 2'-O-methyladenosine-3'-phosphate
  modified_base 20: mod_base = OTHER; note = 2'-O-methyluridine-3'-phosphate
  modified_base 21: mod_base = OTHER; note = 2'-O-methyladenosine-3'-phosphate attached to N-[tris(N-acetylgalactosamine-alkyl)-amidodecanoyl)]-4-hydr oxyprolinol Hyp-(N-acetylgalactosamine-alkyl)3
ccagtgtataaatccaatata

SEQ ID NO: 3681 - RNA, 21 nt, synthetic construct
  misc_feature 1..21: note = Description of Artificial Sequence: Synthetic oligonucleotide
  source 1..21: mol_type = other RNA
  modified_base 1: mod_base = OTHER; note = 2'-O-methyluridine-3'-phosphorothioate
  modified_base 2: mod_base = OTHER; note = 2'-O-methylcytidine-3'- phosphorothioate
  modified_base 3: mod_base = OTHER; note = 2'-O-methylcytidine-3'-phosphate
  modified_base 4: mod_base = OTHER; note = 2'-O-methyladenosine-3'-phosphate
  modified_base 5: mod_base = OTHER; note = 2'-O-methyladenosine-3'-phosphate
  modified_base 6: mod_base = OTHER; note = 2'-O-methylguanosine-3'-phosphate
  modified_base 7: mod_base = OTHER; note = 2'-fluorouridine-3'-phosphate
  modified_base 8: mod_base = OTHER; note = 2'-O-methylguanosine-3'-phosphate
  modified_base 9: mod_base = OTHER; note = 2'-fluorouridine-3'-phosphate
  modified_base 10: mod_base = OTHER; note = 2'-fluorouridine-3'-phosphate
  modified_base 11: mod_base = OTHER; note = 2'-fluoroadenosine-3'-phosphate
  modified_base 12: mod_base = OTHER; note = 2'-O-methyluridine-3'-phosphate
  modified_base 13: mod_base = OTHER; note = 2'-O-methyladenosine-3'-phosphate
  modified_base 14: mod_base = OTHER; note = 2'-O-methylcytidine-3'-phosphate
  modified_base 15: mod_base = OTHER; note = 2'-O-methylcytidine-3'-phosphate
  modified_base 16: mod_base = OTHER; note = 2'-O-methyladenosine-3'-phosphate
  modified_base 17: mod_base = OTHER; note = 2'-O-methyladenosine-3'-phosphate
  modified_base 18: mod_base = OTHER; note = 2'-O-methylcytidine-3'-phosphate
  modified_base 19: mod_base = OTHER; note = 2'-O-methyluridine-3'-phosphate
  modified_base 20: mod_base = OTHER; note = 2'-O-methyladenosine-3'-phosphate
  modified_base 21: mod_base = OTHER; note = 2'-O-methyladenosine-3'-phosphate attached to N-[tris(N-acetylgalactosamine-alkyl)-amidodecanoyl)]-4-hydr oxyprolinol Hyp-(N-acetylgalactosamine-alkyl)3
tccaagtgttataccaactaa

SEQ ID NO: 3682 - RNA, 21 nt, synthetic construct
  misc_feature 1..21: note = Description of Artificial Sequence: Synthetic oligonucleotide
  source 1..21: mol_type = other RNA
  modified_base 1: mod_base = OTHER; note = 2'-O-methylguanosine-3'- phosphorothioate
  modified_base 2: mod_base = OTHER; note = 2'-O-methyladenosine-3'- phosphorothioate
  modified_base 3: mod_base = OTHER; note = 2'-O-methyladenosine-3'-phosphate
  modified_base 4: mod_base = OTHER; note = 2'-O-methylcytidine-3'-phosphate
  modified_base 5: mod_base = OTHER; note = 2'-O-methyladenosine-3'-phosphate
  modified_base 6: mod_base = OTHER; note = 2'-O-methylcytidine-3'-phosphate
  modified_base 7: mod_base = OTHER; note = 2'-fluorocytidine-3'-phosphate
  modified_base 8: mod_base = OTHER; note = 2'-O-methyladenosine-3'-phosphate
  modified_base 9: mod_base = OTHER; note = 2'-fluoroadenosine-3'-phosphate
  modified_base 10: mod_base = OTHER; note = 2'-fluoroadenosine-3'-phosphate
  modified_base 11: mod_base = OTHER; note = 2'-fluoroguanosine-3'-phosphate
  modified_base 12: mod_base = OTHER; note = 2'-O-methyladenosine-3'-phosphate
  modified_base 13: mod_base = OTHER; note = 2'-O-methyluridine-3'-phosphate
  modified_base 14: mod_base = OTHER; note = 2'-O-methyluridine-3'-phosphate
  modified_base 15: mod_base = OTHER; note = 2'-O-methylguanosine-3'-phosphate
  modified_base 16: mod_base = OTHER; note = 2'-O-methyluridine-3'-phosphate
  modified_base 17: mod_base = OTHER; note = 2'-O-methylcytidine-3'-phosphate
  modified_base 18: mod_base = OTHER; note = 2'-O-methyluridine-3'-phosphate
  modified_base 19: mod_base = OTHER; note = 2'-O-methylcytidine-3'-phosphate
  modified_base 20: mod_base = OTHER; note = 2'-O-methyluridine-3'-phosphate
  modified_base 21: mod_base = OTHER; note = 2'-O-methyladenosine-3'-phosphate attached to N-[tris(N-acetylgalactosamine-alkyl)-amidodecanoyl)]-4-hydr oxyprolinol Hyp-(N-acetylgalactosamine-alkyl)3
gaacaccaaagattgtctcta

SEQ ID NO: 3683 - RNA, 21 nt, synthetic construct
  misc_feature 1..21: note = Description of Artificial Sequence: Synthetic oligonucleotide
  source 1..21: mol_type = other RNA
  modified_base 1: mod_base = OTHER; note = 2'-O-methyladenosine-3'- phosphorothioate
  modified_base 2: mod_base = OTHER; note = 2'-O-methyladenosine-3'- phosphorothioate
  modified_base 3: mod_base = OTHER; note = 2'-O-methylcytidine-3'-phosphate
  modified_base 4: mod_base = OTHER; note = 2'-O-methyladenosine-3'-phosphate
  modified_base 5: mod_base = OTHER; note = 2'-O-methylcytidine-3'-phosphate
  modified_base 6: mod_base = OTHER; note = 2'-O-methylcytidine-3'-phosphate
  modified_base 7: mod_base = OTHER; note = 2'-fluoroadenosine-3'-phosphate
  modified_base 8: mod_base = OTHER; note = 2'-O-methyladenosine-3'-phosphate
  modified_base 9: mod_base = OTHER; note = 2'-fluoroadenosine-3'-phosphate
  modified_base 10: mod_base = OTHER; note = 2'-fluoroguanosine-3'-phosphate
  modified_base 11: mod_base = OTHER; note = 2'-fluoroadenosine-3'-phosphate
  modified_base 12: mod_base = OTHER; note = 2'-O-methyluridine-3'-phosphate
  modified_base 13: mod_base = OTHER; note = 2'-O-methyluridine-3'-phosphate
  modified_base 14: mod_base = OTHER; note = 2'-O-methylguanosine-3'-phosphate
  modified_base 15: mod_base = OTHER; note = 2'-O-methyluridine-3'-phosphate
  modified_base 16: mod_base = OTHER; note = 2'-O-methylcytidine-3'-phosphate
  modified_base 17: mod_base = OTHER; note = 2'-O-methyluridine-3'-phosphate
  modified_base 18: mod_base = OTHER; note = 2'-O-methylcytidine-3'-phosphate
  modified_base 19: mod_base = OTHER; note = 2'-O-methyluridine-3'-phosphate
  modified_base 20: mod_base = OTHER; note = 2'-O-methylguanosine-3'-phosphate
  modified_base 21: mod_base = OTHER; note = 2'-O-methyladenosine-3'-phosphate attached to N-[tris(N-acetylgalactosamine-alkyl)-amidodecanoyl)]-4-hydr oxyprolinol Hyp-(N-acetylgalactosamine-alkyl)3
aacaccaaagattgtctctga

SEQ ID NO: 3684 - RNA, 21 nt, synthetic construct
  misc_feature 1..21: note = Description of Artificial Sequence: Synthetic oligonucleotide
  source 1..21: mol_type = other RNA
  modified_base 1: mod_base = OTHER; note = 2'-O-methyladenosine-3'- phosphorothioate
  modified_base 2: mod_base = OTHER; note = 2'-O-methyluridine-3'-phosphorothioate
  modified_base 3: mod_base = OTHER; note = 2'-O-methylguanosine-3'-phosphate
  modified_base 4: mod_base = OTHER; note = 2'-O-methyluridine-3'-phosphate
  modified_base 5: mod_base = OTHER; note = 2'-O-methyluridine-3'-phosphate
  modified_base 6: mod_base = OTHER; note = 2'-O-methylguanosine-3'-phosphate
  modified_base 7: mod_base = OTHER; note = 2'-fluorouridine-3'-phosphate
  modified_base 8: mod_base = OTHER; note = 2'-O-methylcytidine-3'-phosphate
  modified_base 9: mod_base = OTHER; note = 2'-fluorocytidine-3'-phosphate
  modified_base 10: mod_base = OTHER; note = 2'-fluorouridine-3'-phosphate
  modified_base 11: mod_base = OTHER; note = 2'-fluorouridine-3'-phosphate
  modified_base 12: mod_base = OTHER; note = 2'-O-methyluridine-3'-phosphate
  modified_base 13: mod_base = OTHER; note = 2'-O-methyluridine-3'-phosphate
  modified_base 14: mod_base = OTHER; note = 2'-O-methyluridine-3'-phosphate
  modified_base 15: mod_base = OTHER; note = 2'-O-methyladenosine-3'-phosphate
  modified_base 16: mod_base = OTHER; note = 2'-O-methyluridine-3'-phosphate
  modified_base 17: mod_base = OTHER; note = 2'-O-methylcytidine-3'-phosphate
  modified_base 18: mod_base = OTHER; note = 2'-O-methyluridine-3'-phosphate
  modified_base 19: mod_base = OTHER; note = 2'-O-methylguanosine-3'-phosphate
  modified_base 20: mod_base = OTHER; note = 2'-O-methyladenosine-3'-phosphate
  modified_base 21: mod_base = OTHER; note = 2'-O-methyluridine-3'-phosphate attached to N-[tris(N-acetylgalactosamine-alkyl)-amidodecanoyl)]-4-hydr oxyprolinol Hyp-(N-acetylgalactosamine-alkyl)3
atgttgtcctttttatctgat

SEQ ID NO: 3685 - RNA, 21 nt, synthetic construct
  misc_feature 1..21: note = Description of Artificial Sequence: Synthetic oligonucleotide
  source 1..21: mol_type = other RNA
  modified_base 1: mod_base = OTHER; note = 2'-O-methyluridine-3'-phosphorothioate
  modified_base 2: mod_base = OTHER; note = 2'-O-methylcytidine-3'- phosphorothioate
  modified_base 3: mod_base = OTHER; note = 2'-O-methyladenosine-3'-phosphate
  modified_base 4: mod_base = OTHER; note = 2'-O-methyladenosine-3'-phosphate
  modified_base 5: mod_base = OTHER; note = 2'-O-methylcytidine-3'-phosphate
  modified_base 6: mod_base = OTHER; note = 2'-O-methyluridine-3'-phosphate
  modified_base 7: mod_base = OTHER; note = 2'-fluorocytidine-3'-phosphate
  modified_base 8: mod_base = OTHER; note = 2'-O-methylcytidine-3'-phosphate
  modified_base 9: mod_base = OTHER; note = 2'-fluorouridine-3'-phosphate
  modified_base 10: mod_base = OTHER; note = 2'-fluoroguanosine-3'-phosphate
  modified_base 11: mod_base = OTHER; note = 2'-fluoroadenosine-3'-phosphate
  modified_base 12: mod_base = OTHER; note = 2'-O-methyladenosine-3'-phosphate
  modified_base 13: mod_base = OTHER; note = 2'-O-methylguanosine-3'-phosphate
  modified_base 14: mod_base = OTHER; note = 2'-O-methyluridine-3'-phosphate
  modified_base 15: mod_base = OTHER; note = 2'-O-methyluridine-3'-phosphate
  modified_base 16: mod_base = OTHER; note = 2'-O-methyladenosine-3'-phosphate
  modified_base 17: mod_base = OTHER; note = 2'-O-methylguanosine-3'-phosphate
  modified_base 18: mod_base = OTHER; note = 2'-O-methyladenosine-3'-phosphate
  modified_base 19: mod_base = OTHER; note = 2'-O-methyladenosine-3'-phosphate
  modified_base 20: mod_base = OTHER; note = 2'-O-methyladenosine-3'-phosphate
  modified_base 21: mod_base = OTHER; note = 2'-O-methyluridine-3'-phosphate attached to N-[tris(N-acetylgalactosamine-alkyl)-amidodecanoyl)]-4-hydr oxyprolinol Hyp-(N-acetylgalactosamine-alkyl)3
tcaactcctgaagttagaaat

SEQ ID NO: 3686 - RNA, 21 nt, synthetic construct
  misc_feature 1..21: note = Description of Artificial Sequence: Synthetic oligonucleotide
  source 1..21: mol_type = other RNA
  modified_base 1: mod_base = OTHER; note = 2'-O-methyladenosine-3'- phosphorothioate
  modified_base 2: mod_base = OTHER; note = 2'-O-methyladenosine-3'- phosphorothioate
  modified_base 3: mod_base = OTHER; note = 2'-O-methylcytidine-3'-phosphate
  modified_base 4: mod_base = OTHER; note = 2'-O-methyluridine-3'-phosphate
  modified_base 5: mod_base = OTHER; note = 2'-O-methyladenosine-3'-phosphate
  modified_base 6: mod_base = OTHER; note = 2'-O-methyluridine-3'-phosphate
  modified_base 7: mod_base = OTHER; note = 2'-fluorocytidine-3'-phosphate
  modified_base 8: mod_base = OTHER; note = 2'-O-methylcytidine-3'-phosphate
  modified_base 9: mod_base = OTHER; note = 2'-fluoroadenosine-3'-phosphate
  modified_base 10: mod_base = OTHER; note = 2'-fluoroadenosine-3'-phosphate
  modified_base 11: mod_base = OTHER; note = 2'-fluoroguanosine-3'-phosphate
  modified_base 12: mod_base = OTHER; note = 2'-O-methyluridine-3'-phosphate
  modified_base 13: mod_base = OTHER; note = 2'-O-methylguanosine-3'-phosphate
  modified_base 14: mod_base = OTHER; note = 2'-O-methyluridine-3'-phosphate
  modified_base 15: mod_base = OTHER; note = 2'-O-methyluridine-3'-phosphate
  modified_base 16: mod_base = OTHER; note = 2'-O-methyladenosine-3'-phosphate
  modified_base 17: mod_base = OTHER; note = 2'-O-methyluridine-3'-phosphate
  modified_base 18: mod_base = OTHER; note = 2'-O-methyladenosine-3'-phosphate
  modified_base 19: mod_base = OTHER; note = 2'-O-methylcytidine-3'-phosphate
  modified_base 20: mod_base = OTHER; note = 2'-O-methylcytidine-3'-phosphate
  modified_base 21: mod_base = OTHER; note = 2'-O-methyladenosine-3'-phosphate attached to N-[tris(N-acetylgalactosamine-alkyl)-amidodecanoyl)]-4-hydr oxyprolinol Hyp-(N-acetylgalactosamine-alkyl)3
aactatccaagtgttatacca

SEQ ID NO: 3687 - RNA, 21 nt, synthetic construct
  misc_feature 1..21: note = Description of Artificial Sequence: Synthetic oligonucleotide
  source 1..21: mol_type = other RNA
  modified_base 1: mod_base = OTHER; note = 2'-O-methylguanosine-3'- phosphorothioate
  modified_base 2: mod_base = OTHER; note = 2'-O-methylguanosine-3'- phosphorothioate
  modified_base 3: mod_base = OTHER; note = 2'-O-methyluridine-3'-phosphate
  modified_base 4: mod_base = OTHER; note = 2'-O-methyladenosine-3'-phosphate
  modified_base 5: mod_base = OTHER; note = 2'-O-methyluridine-3'-phosphate
  modified_base 6: mod_base = OTHER; note = 2'-O-methyluridine-3'-phosphate
  modified_base 7: mod_base = OTHER; note = 2'-fluoroadenosine-3'-phosphate
  modified_base 8: mod_base = OTHER; note = 2'-O-methyladenosine-3'-phosphate
  modified_base 9: mod_base = OTHER; note = 2'-fluorouridine-3'-phosphate
  modified_base 10: mod_base = OTHER; note = 2'-fluorocytidine-3'-phosphate
  modified_base 11: mod_base = OTHER; note = 2'-fluorouridine-3'-phosphate
  modified_base 12: mod_base = OTHER; note = 2'-O-methyluridine-3'-phosphate
  modified_base 13: mod_base = OTHER; note = 2'-O-methylguanosine-3'-phosphate
  modified_base 14: mod_base = OTHER; note = 2'-O-methyluridine-3'-phosphate
  modified_base 15: mod_base = OTHER; note = 2'-O-methylguanosine-3'-phosphate
  modified_base 16: mod_base = OTHER; note = 2'-O-methyluridine-3'-phosphate
  modified_base 17: mod_base = OTHER; note = 2'-O-methyladenosine-3'-phosphate
  modified_base 18: mod_base = OTHER; note = 2'-O-methylguanosine-3'-phosphate
  modified_base 19: mod_base = OTHER; note = 2'-O-methyluridine-3'-phosphate
  modified_base 20: mod_base = OTHER; note = 2'-O-methylcytidine-3'-phosphate
  modified_base 21: mod_base = OTHER; note = 2'-O-methyluridine-3'-phosphate attached to N-[tris(N-acetylgalactosamine-alkyl)-amidodecanoyl)]-4-hydr oxyprolinol Hyp-(N-acetylgalactosamine-alkyl)3
ggtattaatcttgtgtagtct

SEQ ID NO: 3688 - RNA, 21 nt, synthetic construct
  misc_feature 1..21: note = Description of Artificial Sequence: Synthetic oligonucleotide
  source 1..21: mol_type = other RNA
  modified_base 1: mod_base = OTHER; note = 2'-O-methylguanosine-3'- phosphorothioate
  modified_base 2: mod_base = OTHER; note = 2'-O-methylguanosine-3'- phosphorothioate
  modified_base 3: mod_base = OTHER; note = 2'-O-methylcytidine-3'-phosphate
  modified_base 4: mod_base = OTHER; note = 2'-O-methyluridine-3'-phosphate
  modified_base 5: mod_base = OTHER; note = 2'-O-methylcytidine-3'-phosphate
  modified_base 6: mod_base = OTHER; note = 2'-O-methylcytidine-3'-phosphate
  modified_base 7: mod_base = OTHER; note = 2'-fluorouridine-3'-phosphate
  modified_base 8: mod_base = OTHER; note = 2'-O-methyluridine-3'-phosphate
  modified_base 9: mod_base = OTHER; note = 2'-fluorocytidine-3'-phosphate
  modified_base 10: mod_base = OTHER; note = 2'-fluoroadenosine-3'-phosphate
  modified_base 11: mod_base = OTHER; note = 2'-fluorocytidine-3'-phosphate
  modified_base 12: mod_base = OTHER; note = 2'-O-methyluridine-3'-phosphate
  modified_base 13: mod_base = OTHER; note = 2'-O-methylguanosine-3'-phosphate
  modified_base 14: mod_base = OTHER; note = 2'-O-methyladenosine-3'-phosphate
  modified_base 15: mod_base = OTHER; note = 2'-O-methyladenosine-3'-phosphate
  modified_base 16: mod_base = OTHER; note = 2'-O-methylcytidine-3'-phosphate
  modified_base 17: mod_base = OTHER; note = 2'-O-methyladenosine-3'-phosphate
  modified_base 18: mod_base = OTHER; note = 2'-O-methyluridine-3'-phosphate
  modified_base 19: mod_base = OTHER; note = 2'-O-methylguanosine-3'-phosphate
  modified_base 20: mod_base = OTHER; note = 2'-O-methylcytidine-3'-phosphate
  modified_base 21: mod_base = OTHER; note = 2'-O-methyladenosine-3'-phosphate attached to N-[tris(N-acetylgalactosamine-alkyl)-amidodecanoyl)]-4-hydr oxyprolinol Hyp-(N-acetylgalactosamine-alkyl)3
ggctccttcactgaacatgca

SEQ ID NO: 3689 - RNA, 21 nt, synthetic construct
  misc_feature 1..21: note = Description of Artificial Sequence: Synthetic oligonucleotide
  source 1..21: mol_type = other RNA
  modified_base 1: mod_base = OTHER; note = 2'-O-methyluridine-3'-phosphorothioate
  modified_base 2: mod_base = OTHER; note = 2'-O-methyladenosine-3'- phosphorothioate
  modified_base 3: mod_base = OTHER; note = 2'-O-methyluridine-3'-phosphate
  modified_base 4: mod_base = OTHER; note = 2'-O-methylcytidine-3'-phosphate
  modified_base 5: mod_base = OTHER; note = 2'-O-methyladenosine-3'-phosphate
  modified_base 6: mod_base = OTHER; note = 2'-O-methylguanosine-3'-phosphate
  modified_base 7: mod_base = OTHER; note = 2'-fluorouridine-3'-phosphate
  modified_base 8: mod_base = OTHER; note = 2'-O-methyladenosine-3'-phosphate
  modified_base 9: mod_base = OTHER; note = 2'-fluoroguanosine-3'-phosphate
  modified_base 10: mod_base = OTHER; note = 2'-fluorouridine-3'-phosphate
  modified_base 11: mod_base = OTHER; note = 2'-fluoroguanosine-3'-phosphate
  modified_base 12: mod_base = OTHER; note = 2'-O-methyluridine-3'-phosphate
  modified_base 13: mod_base = OTHER; note = 2'-O-methyladenosine-3'-phosphate
  modified_base 14: mod_base = OTHER; note = 2'-O-methylcytidine-3'-phosphate
  modified_base 15: mod_base = OTHER; note = 2'-O-methyladenosine-3'-phosphate
  modified_base 16: mod_base = OTHER; note = 2'-O-methyluridine-3'-phosphate
  modified_base 17: mod_base = OTHER; note = 2'-O-methyluridine-3'-phosphate
  modified_base 18: mod_base = OTHER; note = 2'-O-methyladenosine-3'-phosphate
  modified_base 19: mod_base = OTHER; note = 2'-O-methylcytidine-3'-phosphate
  modified_base 20: mod_base = OTHER; note = 2'-O-methylcytidine-3'-phosphate
  modified_base 21: mod_base = OTHER; note = 2'-O-methyladenosine-3'-phosphate attached to N-[tris(N-acetylgalactosamine-alkyl)-amidodecanoyl)]-4-hydr oxyprolinol Hyp-(N-acetylgalactosamine-alkyl)3
tatcagtagtgtacattacca

SEQ ID NO: 3690 - RNA, 21 nt, synthetic construct
  misc_feature 1..21: note = Description of Artificial Sequence: Synthetic oligonucleotide
  source 1..21: mol_type = other RNA
  modified_base 1: mod_base = OTHER; note = 2'-O-methylcytidine-3'- phosphorothioate
  modified_base 2: mod_base = OTHER; note = 2'-O-methyladenosine-3'- phosphorothioate
  modified_base 3: mod_base = OTHER; note = 2'-O-methylguanosine-3'-phosphate
  modified_base 4: mod_base = OTHER; note = 2'-O-methylcytidine-3'-phosphate
  modified_base 5: mod_base = OTHER; note = 2'-O-methylcytidine-3'-phosphate
  modified_base 6: mod_base = OTHER; note = 2'-O-methyluridine-3'-phosphate
  modified_base 7: mod_base = OTHER; note = 2'-fluorouridine-3'-phosphate
  modified_base 8: mod_base = OTHER; note = 2'-O-methyluridine-3'-phosphate
  modified_base 9: mod_base = OTHER; note = 2'-fluorouridine-3'-phosphate
  modified_base 10: mod_base = OTHER; note = 2'-fluorocytidine-3'-phosphate
  modified_base 11: mod_base = OTHER; note = 2'-fluorocytidine-3'-phosphate
  modified_base 12: mod_base = OTHER; note = 2'-O-methyluridine-3'-phosphate
  modified_base 13: mod_base = OTHER; note = 2'-O-methyluridine-3'-phosphate
  modified_base 14: mod_base = OTHER; note = 2'-O-methyladenosine-3'-phosphate
  modified_base 15: mod_base = OTHER; note = 2'-O-methylguanosine-3'-phosphate
  modified_base 16: mod_base = OTHER; note = 2'-O-methyladenosine-3'-phosphate
  modified_base 17: mod_base = OTHER; note = 2'-O-methyladenosine-3'-phosphate
  modified_base 18: mod_base = OTHER; note = 2'-O-methylcytidine-3'-phosphate
  modified_base 19: mod_base = OTHER; note = 2'-O-methyladenosine-3'-phosphate
  modified_base 20: mod_base = OTHER; note = 2'-O-methylcytidine-3'-phosphate
  modified_base 21: mod_base = OTHER; note = 2'-O-methyladenosine-3'-phosphate attached to N-[tris(N-acetylgalactosamine-alkyl)-amidodecanoyl)]-4-hydr oxyprolinol Hyp-(N-acetylgalactosamine-alkyl)3
cagccttttccttagaacaca

SEQ ID NO: 3691 - RNA, 21 nt, synthetic construct
  misc_feature 1..21: note = Description of Artificial Sequence: Synthetic oligonucleotide
  source 1..21: mol_type = other RNA
  modified_base 1: mod_base = OTHER; note = 2'-O-methylcytidine-3'- phosphorothioate
  modified_base 2: mod_base = OTHER; note = 2'-O-methyluridine-3'-phosphorothioate
  modified_base 3: mod_base = OTHER; note = 2'-O-methylguanosine-3'-phosphate
  modified_base 4: mod_base = OTHER; note = 2'-O-methylguanosine-3'-phosphate
  modified_base 5: mod_base = OTHER; note = 2'-O-methyluridine-3'-phosphate
  modified_base 6: mod_base = OTHER; note = 2'-O-methyluridine-3'-phosphate
  modified_base 7: mod_base = OTHER; note = 2'-fluoroadenosine-3'-phosphate
  modified_base 8: mod_base = OTHER; note = 2'-O-methylguanosine-3'-phosphate
  modified_base 9: mod_base = OTHER; note = 2'-fluorouridine-3'-phosphate
  modified_base 10: mod_base = OTHER; note = 2'-fluoroguanosine-3'-phosphate
  modified_base 11: mod_base = OTHER; note = 2'-fluorouridine-3'-phosphate
  modified_base 12: mod_base = OTHER; note = 2'-O-methylguanosine-3'-phosphate
  modified_base 13: mod_base = OTHER; note = 2'-O-methyladenosine-3'-phosphate
  modified_base 14: mod_base = OTHER; note = 2'-O-methyladenosine-3'-phosphate
  modified_base 15: mod_base = OTHER; note = 2'-O-methyladenosine-3'-phosphate
  modified_base 16: mod_base = OTHER; note = 2'-O-methyluridine-3'-phosphate
  modified_base 17: mod_base = OTHER; note = 2'-O-methyladenosine-3'-phosphate
  modified_base 18: mod_base = OTHER; note = 2'-O-methylguanosine-3'-phosphate
  modified_base 19: mod_base = OTHER; note = 2'-O-methyluridine-3'-phosphate
  modified_base 20: mod_base = OTHER; note = 2'-O-methyluridine-3'-phosphate
  modified_base 21: mod_base = OTHER; note = 2'-O-methyladenosine-3'-phosphate attached to N-[tris(N-acetylgalactosamine-alkyl)-amidodecanoyl)]-4-hydr oxyprolinol Hyp-(N-acetylgalactosamine-alkyl)3
ctggttagtgtgaaatagtta

SEQ ID NO: 3692 - RNA, 21 nt, synthetic construct
  misc_feature 1..21: note = Description of Artificial Sequence: Synthetic oligonucleotide
  source 1..21: mol_type = other RNA
  modified_base 1: mod_base = OTHER; note = 2'-O-methyladenosine-3'- phosphorothioate
  modified_base 2: mod_base = OTHER; note = 2'-O-methylcytidine-3'- phosphorothioate
  modified_base 3: mod_base = OTHER; note = 2'-O-methyluridine-3'-phosphate
  modified_base 4: mod_base = OTHER; note = 2'-O-methyladenosine-3'-phosphate
  modified_base 5: mod_base = OTHER; note = 2'-O-methyluridine-3'-phosphate
  modified_base 6: mod_base = OTHER; note = 2'-O-methyladenosine-3'-phosphate
  modified_base 7: mod_base = OTHER; note = 2'-fluorouridine-3'-phosphate
  modified_base 8: mod_base = OTHER; note = 2'-O-methylcytidine-3'-phosphate
  modified_base 9: mod_base = OTHER; note = 2'-fluoroadenosine-3'-phosphate
  modified_base 10: mod_base = OTHER; note = 2'-fluoroguanosine-3'-phosphate
  modified_base 11: mod_base = OTHER; note = 2'-fluorouridine-3'-phosphate
  modified_base 12: mod_base = OTHER; note = 2'-O-methyladenosine-3'-phosphate
  modified_base 13: mod_base = OTHER; note = 2'-O-methylguanosine-3'-phosphate
  modified_base 14: mod_base = OTHER; note = 2'-O-methyluridine-3'-phosphate
  modified_base 15: mod_base = OTHER; note = 2'-O-methylguanosine-3'-phosphate
  modified_base 16: mod_base = OTHER; note = 2'-O-methyluridine-3'-phosphate
  modified_base 17: mod_base = OTHER; note = 2'-O-methyladenosine-3'-phosphate
  modified_base 18: mod_base = OTHER; note = 2'-O-methylcytidine-3'-phosphate
  modified_base 19: mod_base = OTHER; note = 2'-O-methyladenosine-3'-phosphate
  modified_base 20: mod_base = OTHER; note = 2'-O-methyluridine-3'-phosphate
  modified_base 21: mod_base = OTHER; note = 2'-O-methyluridine-3'-phosphate attached to N-[tris(N-acetylgalactosamine-alkyl)-amidodecanoyl)]-4-hydr oxyprolinol Hyp-(N-acetylgalactosamine-alkyl)3
actatatcagtagtgtacatt

SEQ ID NO: 3693 - RNA, 21 nt, synthetic construct
  misc_feature 1..21: note = Description of Artificial Sequence: Synthetic oligonucleotide
  source 1..21: mol_type = other RNA
  modified_base 1: mod_base = OTHER; note = 2'-O-methyluridine-3'-phosphorothioate
  modified_base 2: mod_base = OTHER; note = 2'-O-methyladenosine-3'- phosphorothioate
  modified_base 3: mod_base = OTHER; note = 2'-O-methyluridine-3'-phosphate
  modified_base 4: mod_base = OTHER; note = 2'-O-methyladenosine-3'-phosphate
  modified_base 5: mod_base = OTHER; note = 2'-O-methyluridine-3'-phosphate
  modified_base 6: mod_base = OTHER; note = 2'-O-methylcytidine-3'-phosphate
  modified_base 7: mod_base = OTHER; note = 2'-fluoroadenosine-3'-phosphate
  modified_base 8: mod_base = OTHER; note = 2'-O-methylguanosine-3'-phosphate
  modified_base 9: mod_base = OTHER; note = 2'-fluorouridine-3'-phosphate
  modified_base 10: mod_base = OTHER; note = 2'-fluoroadenosine-3'-phosphate
  modified_base 11: mod_base = OTHER; note = 2'-fluoroguanosine-3'-phosphate
  modified_base 12: mod_base = OTHER; note = 2'-O-methyluridine-3'-phosphate
  modified_base 13: mod_base = OTHER; note = 2'-O-methylguanosine-3'-phosphate
  modified_base 14: mod_base = OTHER; note = 2'-O-methyluridine-3'-phosphate
  modified_base 15: mod_base = OTHER; note = 2'-O-methyladenosine-3'-phosphate
  modified_base 16: mod_base = OTHER; note = 2'-O-methylcytidine-3'-phosphate
  modified_base 17: mod_base = OTHER; note = 2'-O-methyladenosine-3'-phosphate
  modified_base 18: mod_base = OTHER; note = 2'-O-methyluridine-3'-phosphate
  modified_base 19: mod_base = OTHER; note = 2'-O-methyluridine-3'-phosphate
  modified_base 20: mod_base = OTHER; note = 2'-O-methyladenosine-3'-phosphate
  modified_base 21: mod_base = OTHER; note = 2'-O-methyladenosine-3'-phosphate attached to N-[tris(N-acetylgalactosamine-alkyl)-amidodecanoyl)]-4-hydr oxyprolinol Hyp-(N-acetylgalactosamine-alkyl)3
tatatcagtagtgtacattaa

SEQ ID NO: 3694 - RNA, 21 nt, synthetic construct
  misc_feature 1..21: note = Description of Artificial Sequence: Synthetic oligonucleotide
  source 1..21: mol_type = other RNA
  modified_base 1: mod_base = OTHER; note = 2'-O-methylguanosine-3'- phosphorothioate
  modified_base 2: mod_base = OTHER; note = 2'-O-methyluridine-3'-phosphorothioate
  modified_base 3: mod_base = OTHER; note = 2'-O-methyladenosine-3'-phosphate
  modified_base 4: mod_base = OTHER; note = 2'-O-methyladenosine-3'-phosphate
  modified_base 5: mod_base = OTHER; note = 2'-O-methyluridine-3'-phosphate
  modified_base 6: mod_base = OTHER; note = 2'-O-methyladenosine-3'-phosphate
  modified_base 7: mod_base = OTHER; note = 2'-fluorouridine-3'-phosphate
  modified_base 8: mod_base = OTHER; note = 2'-O-methyluridine-3'-phosphate
  modified_base 9: mod_base = OTHER; note = 2'-fluorouridine-3'-phosphate
  modified_base 10: mod_base = OTHER; note = 2'-fluorouridine-3'-phosphate
  modified_base 11: mod_base = OTHER; note = 2'-fluoroadenosine-3'-phosphate
  modified_base 12: mod_base = OTHER; note = 2'-O-methyladenosine-3'-phosphate
  modified_base 13: mod_base = OTHER; note = 2'-O-methylguanosine-3'-phosphate
  modified_base 14: mod_base = OTHER; note = 2'-O-methyladenosine-3'-phosphate
  modified_base 15: mod_base = OTHER; note = 2'-O-methyluridine-3'-phosphate
  modified_base 16: mod_base = OTHER; note = 2'-O-methylguanosine-3'-phosphate
  modified_base 17: mod_base = OTHER; note = 2'-O-methylguanosine-3'-phosphate
  modified_base 18: mod_base = OTHER; note = 2'-O-methyladenosine-3'-phosphate
  modified_base 19: mod_base = OTHER; note = 2'-O-methylcytidine-3'-phosphate
  modified_base 20: mod_base = OTHER; note = 2'-O-methyluridine-3'-phosphate
  modified_base 21: mod_base = OTHER; note = 2'-O-methyladenosine-3'-phosphate attached to N-[tris(N-acetylgalactosamine-alkyl)-amidodecanoyl)]-4-hydr oxyprolinol Hyp-(N-acetylgalactosamine-alkyl)3
gtaatattttaagatggacta

SEQ ID NO: 3695 - RNA, 21 nt, synthetic construct
  misc_feature 1..21: note = Description of Artificial Sequence: Synthetic oligonucleotide
  source 1..21: mol_type = other RNA
  modified_base 1: mod_base = OTHER; note = 2'-O-methyluridine-3'-phosphorothioate
  modified_base 2: mod_base = OTHER; note = 2'-O-methyluridine-3'-phosphorothioate
  modified_base 3: mod_base = OTHER; note = 2'-O-methyluridine-3'-phosphate
  modified_base 4: mod_base = OTHER; note = 2'-O-methyluridine-3'-phosphate
  modified_base 5: mod_base = OTHER; note = 2'-O-methyladenosine-3'-phosphate
  modified_base 6: mod_base = OTHER; note = 2'-O-methyladenosine-3'-phosphate
  modified_base 7: mod_base = OTHER; note = 2'-fluoroguanosine-3'-phosphate
  modified_base 8: mod_base = OTHER; note = 2'-O-methyladenosine-3'-phosphate
  modified_base 9: mod_base = OTHER; note = 2'-fluorouridine-3'-phosphate
  modified_base 10: mod_base = OTHER; note = 2'-fluoroguanosine-3'-phosphate
  modified_base 11: mod_base = OTHER; note = 2'-fluoroguanosine-3'-phosphate
  modified_base 12: mod_base = OTHER; note = 2'-O-methyladenosine-3'-phosphate
  modified_base 13: mod_base = OTHER; note = 2'-O-methylcytidine-3'-phosphate
  modified_base 14: mod_base = OTHER; note = 2'-O-methyluridine-3'-phosphate
  modified_base 15: mod_base = OTHER; note = 2'-O-methylguanosine-3'-phosphate
  modified_base 16: mod_base = OTHER; note = 2'-O-methylguanosine-3'-phosphate
  modified_base 17: mod_base = OTHER; note = 2'-O-methylguanosine-3'-phosphate
  modified_base 18: mod_base = OTHER; note = 2'-O-methyladenosine-3'-phosphate
  modified_base 19: mod_base = OTHER; note = 2'-O-methyladenosine-3'-phosphate
  modified_base 20: mod_base = OTHER; note = 2'-O-methyladenosine-3'-phosphate
  modified_base 21: mod_base = OTHER; note = 2'-O-methyladenosine-3'-phosphate attached to N-[tris(N-acetylgalactosamine-alkyl)-amidodecanoyl)]-4-hydr oxyprolinol Hyp-(N-acetylgalactosamine-alkyl)3
ttttaagatggactgggaaaa

SEQ ID NO: 3696 - RNA, 21 nt, synthetic construct
  misc_feature 1..21: note = Description of Artificial Sequence: Synthetic oligonucleotide
  source 1..21: mol_type = other RNA
  modified_base 1: mod_base = OTHER; note = 2'-O-methyluridine-3'-phosphorothioate
  modified_base 2: mod_base = OTHER; note = 2'-O-methyluridine-3'-phosphorothioate
  modified_base 3: mod_base = OTHER; note = 2'-O-methylcytidine-3'-phosphate
  modified_base 4: mod_base = OTHER; note = 2'-O-methyladenosine-3'-phosphate
  modified_base 5: mod_base = OTHER; note = 2'-O-methylcytidine-3'-phosphate
  modified_base 6: mod_base = OTHER; note = 2'-O-methyluridine-3'-phosphate
  modified_base 7: mod_base = OTHER; note = 2'-fluoroguanosine-3'-phosphate
  modified_base 8: mod_base = OTHER; note = 2'-O-methyladenosine-3'-phosphate
  modified_base 9: mod_base = OTHER; note = 2'-fluoroadenosine-3'-phosphate
  modified_base 10: mod_base = OTHER; note = 2'-fluorocytidine-3'-phosphate
  modified_base 11: mod_base = OTHER; note = 2'-fluoroadenosine-3'-phosphate
  modified_base 12: mod_base = OTHER; note = 2'-O-methyluridine-3'-phosphate
  modified_base 13: mod_base = OTHER; note = 2'-O-methylguanosine-3'-phosphate
  modified_base 14: mod_base = OTHER; note = 2'-O-methylcytidine-3'-phosphate
  modified_base 15: mod_base = OTHER; note = 2'-O-methylcytidine-3'-phosphate
  modified_base 16: mod_base = OTHER; note = 2'-O-methyluridine-3'-phosphate
  modified_base 17: mod_base = OTHER; note = 2'-O-methyladenosine-3'-phosphate
  modified_base 18: mod_base = OTHER; note = 2'-O-methylguanosine-3'-phosphate
  modified_base 19: mod_base = OTHER; note = 2'-O-methyluridine-3'-phosphate
  modified_base 20: mod_base = OTHER; note = 2'-O-methylcytidine-3'-phosphate
  modified_base 21: mod_base = OTHER; note = 2'-O-methyladenosine-3'-phosphate attached to N-[tris(N-acetylgalactosamine-alkyl)-amidodecanoyl)]-4-hydr oxyprolinol Hyp-(N-acetylgalactosamine-alkyl)3
ttcactgaacatgcctagtca

SEQ ID NO: 3697 - RNA, 21 nt, synthetic construct
  misc_feature 1..21: note = Description of Artificial Sequence: Synthetic oligonucleotide
  source 1..21: mol_type = other RNA
  modified_base 1: mod_base = OTHER; note = 2'-O-methyladenosine-3'- phosphorothioate
  modified_base 2: mod_base = OTHER; note = 2'-O-methylcytidine-3'- phosphorothioate
  modified_base 3: mod_base = OTHER; note = 2'-O-methylcytidine-3'-phosphate
  modified_base 4: mod_base = OTHER; note = 2'-O-methyladenosine-3'-phosphate
  modified_base 5: mod_base = OTHER; note = 2'-O-methyladenosine-3'-phosphate
  modified_base 6: mod_base = OTHER; note = 2'-O-methylcytidine-3'-phosphate
  modified_base 7: mod_base = OTHER; note = 2'-fluorouridine-3'-phosphate
  modified_base 8: mod_base = OTHER; note = 2'-O-methyladenosine-3'-phosphate
  modified_base 9: mod_base = OTHER; note = 2'-fluorouridine-3'-phosphate
  modified_base 10: mod_base = OTHER; note = 2'-fluorocytidine-3'-phosphate
  modified_base 11: mod_base = OTHER; note = 2'-fluorocytidine-3'-phosphate
  modified_base 12: mod_base = OTHER; note = 2'-O-methyladenosine-3'-phosphate
  modified_base 13: mod_base = OTHER; note = 2'-O-methyladenosine-3'-phosphate
  modified_base 14: mod_base = OTHER; note = 2'-O-methylguanosine-3'-phosphate
  modified_base 15: mod_base = OTHER; note = 2'-O-methyluridine-3'-phosphate
  modified_base 16: mod_base = OTHER; note = 2'-O-methylguanosine-3'-phosphate
  modified_base 17: mod_base = OTHER; note = 2'-O-methyluridine-3'-phosphate
  modified_base 18: mod_base = OTHER; note = 2'-O-methyluridine-3'-phosphate
  modified_base 19: mod_base = OTHER; note = 2'-O-methyladenosine-3'-phosphate
  modified_base 20: mod_base = OTHER; note = 2'-O-methyluridine-3'-phosphate
  modified_base 21: mod_base = OTHER; note = 2'-O-methyladenosine-3'-phosphate attached to N-[tris(N-acetylgalactosamine-alkyl)-amidodecanoyl)]-4-hydr oxyprolinol Hyp-(N-acetylgalactosamine-alkyl)3
accaactatccaagtgttata

SEQ ID NO: 3698 - RNA, 21 nt, synthetic construct
  misc_feature 1..21: note = Description of Artificial Sequence: Synthetic oligonucleotide
  source 1..21: mol_type = other RNA
  modified_base 1: mod_base = OTHER; note = 2'-O-methylcytidine-3'- phosphorothioate
  modified_base 2: mod_base = OTHER; note = 2'-O-methylcytidine-3'- phosphorothioate
  modified_base 3: mod_base = OTHER; note = 2'-O-methyladenosine-3'-phosphate
  modified_base 4: mod_base = OTHER; note = 2'-O-methyladenosine-3'-phosphate
  modified_base 5: mod_base = OTHER; note = 2'-O-methylguanosine-3'-phosphate
  modified_base 6: mod_base = OTHER; note = 2'-O-methyluridine-3'-phosphate
  modified_base 7: mod_base = OTHER; note = 2'-fluoroguanosine-3'-phosphate
  modified_base 8: mod_base = OTHER; note = 2'-O-methyluridine-3'-phosphate
  modified_base 9: mod_base = OTHER; note = 2'-fluorouridine-3'-phosphate
  modified_base 10: mod_base = OTHER; note = 2'-fluoroadenosine-3'-phosphate
  modified_base 11: mod_base = OTHER; note = 2'-fluorouridine-3'-phosphate
  modified_base 12: mod_base = OTHER; note = 2'-O-methyladenosine-3'-phosphate
  modified_base 13: mod_base = OTHER; note = 2'-O-methylcytidine-3'-phosphate
  modified_base 14: mod_base = OTHER; note = 2'-O-methylcytidine-3'-phosphate
  modified_base 15: mod_base = OTHER; note = 2'-O-methyladenosine-3'-phosphate
  modified_base 16: mod_base = OTHER; note = 2'-O-methyladenosine-3'-phosphate
  modified_base 17: mod_base = OTHER; note = 2'-O-methylcytidine-3'-phosphate
  modified_base 18: mod_base = OTHER; note = 2'-O-methyluridine-3'-phosphate
  modified_base 19: mod_base = OTHER; note = 2'-O-methyladenosine-3'-phosphate
  modified_base 20: mod_base = OTHER; note = 2'-O-methyladenosine-3'-phosphate
  modified_base 21: mod_base = OTHER; note = 2'-O-methyladenosine-3'-phosphate attached to N-[tris(N-acetylgalactosamine-alkyl)-amidodecanoyl)]-4-hydr oxyprolinol Hyp-(N-acetylgalactosamine-alkyl)3
ccaagtgttataccaactaaa

SEQ ID NO: 3699 - RNA, 21 nt, synthetic construct
  misc_feature 1..21: note = Description of Artificial Sequence: Synthetic oligonucleotide
  source 1..21: mol_type = other RNA
  modified_base 1: mod_base = OTHER; note = 2'-O-methyladenosine-3'- phosphorothioate
  modified_base 2: mod_base = OTHER; note = 2'-O-methylguanosine-3'- phosphorothioate
  modified_base 3: mod_base = OTHER; note = 2'-O-methyluridine-3'-phosphate
  modified_base 4: mod_base = OTHER; note = 2'-O-methyladenosine-3'-phosphate
  modified_base 5: mod_base = OTHER; note = 2'-O-methyladenosine-3'-phosphate
  modified_base 6: mod_base = OTHER; note = 2'-O-methyluridine-3'-phosphate
  modified_base 7: mod_base = OTHER; note = 2'-fluoroadenosine-3'-phosphate
  modified_base 8: mod_base = OTHER; note = 2'-O-methyluridine-3'-phosphate
  modified_base 9: mod_base = OTHER; note = 2'-fluorouridine-3'-phosphate
  modified_base 10: mod_base = OTHER; note = 2'-fluorouridine-3'-phosphate
  modified_base 11: mod_base = OTHER; note = 2'-fluorouridine-3'-phosphate
  modified_base 12: mod_base = OTHER; note = 2'-O-methyladenosine-3'-phosphate
  modified_base 13: mod_base = OTHER; note = 2'-O-methyladenosine-3'-phosphate
  modified_base 14: mod_base = OTHER; note = 2'-O-methylguanosine-3'-phosphate
  modified_base 15: mod_base = OTHER; note = 2'-O-methyladenosine-3'-phosphate
  modified_base 16: mod_base = OTHER; note = 2'-O-methyluridine-3'-phosphate
  modified_base 17: mod_base = OTHER; note = 2'-O-methylguanosine-3'-phosphate
  modified_base 18: mod_base = OTHER; note = 2'-O-methylguanosine-3'-phosphate
  modified_base 19: mod_base = OTHER; note = 2'-O-methyladenosine-3'-phosphate
  modified_base 20: mod_base = OTHER; note = 2'-O-methylcytidine-3'-phosphate
  modified_base 21: mod_base = OTHER; note = 2'-O-methyluridine-3'-phosphate attached to N-[tris(N-acetylgalactosamine-alkyl)-amidodecanoyl)]-4-hydr oxyprolinol Hyp-(N-acetylgalactosamine-alkyl)3
agtaatattttaagatggact

SEQ ID NO: 3700 - RNA, 21 nt, synthetic construct
  misc_feature 1..21: note = Description of Artificial Sequence: Synthetic oligonucleotide
  source 1..21: mol_type = other RNA
  modified_base 1: mod_base = OTHER; note = 2'-O-methyladenosine-3'- phosphorothioate
  modified_base 2: mod_base = OTHER; note = 2'-O-methyladenosine-3'- phosphorothioate
  modified_base 3: mod_base = OTHER; note = 2'-O-methyladenosine-3'-phosphate
  modified_base 4: mod_base = OTHER; note = 2'-O-methyladenosine-3'-phosphate
  modified_base 5: mod_base = OTHER; note = 2'-O-methyluridine-3'-phosphate
  modified_base 6: mod_base = OTHER; note = 2'-O-methylcytidine-3'-phosphate
  modified_base 7: mod_base = OTHER; note = 2'-fluorocytidine-3'-phosphate
  modified_base 8: mod_base = OTHER; note = 2'-O-methyladenosine-3'-phosphate
  modified_base 9: mod_base = OTHER; note = 2'-fluorocytidine-3'-phosphate
  modified_base 10: mod_base = OTHER; note = 2'-fluoroadenosine-3'-phosphate
  modified_base 11: mod_base = OTHER; note = 2'-fluoroguanosine-3'-phosphate
  modified_base 12: mod_base = OTHER; note = 2'-O-methylcytidine-3'-phosphate
  modified_base 13: mod_base = OTHER; note = 2'-O-methyluridine-3'-phosphate
  modified_base 14: mod_base = OTHER; note = 2'-O-methyladenosine-3'-phosphate
  modified_base 15: mod_base = OTHER; note = 2'-O-methyluridine-3'-phosphate
  modified_base 16: mod_base = OTHER; note = 2'-O-methyladenosine-3'-phosphate
  modified_base 17: mod_base = OTHER; note = 2'-O-methyluridine-3'-phosphate
  modified_base 18: mod_base = OTHER; note = 2'-O-methylcytidine-3'-phosphate
  modified_base 19: mod_base = OTHER; note = 2'-O-methylcytidine-3'-phosphate
  modified_base 20: mod_base = OTHER; note = 2'-O-methyluridine-3'-phosphate
  modified_base 21: mod_base = OTHER; note = 2'-O-methyladenosine-3'-phosphate attached to N-[tris(N-acetylgalactosamine-alkyl)-amidodecanoyl)]-4-hydr oxyprolinol Hyp-(N-acetylgalactosamine-alkyl)3
aaaatccacagctatatccta

SEQ ID NO: 3701 - RNA, 21 nt, synthetic construct
  misc_feature 1..21: note = Description of Artificial Sequence: Synthetic oligonucleotide
  source 1..21: mol_type = other RNA
  modified_base 1: mod_base = OTHER; note = 2'-O-methyluridine-3'-phosphorothioate
  modified_base 2: mod_base = OTHER; note = 2'-O-methylcytidine-3'- phosphorothioate
  modified_base 3: mod_base = OTHER; note = 2'-O-methylcytidine-3'-phosphate
  modified_base 4: mod_base = OTHER; note = 2'-O-methyluridine-3'-phosphate
  modified_base 5: mod_base = OTHER; note = 2'-O-methyluridine-3'-phosphate
  modified_base 6: mod_base = OTHER; note = 2'-O-methylcytidine-3'-phosphate
  modified_base 7: mod_base = OTHER; note = 2'-fluoroadenosine-3'-phosphate
  modified_base 8: mod_base = OTHER; note = 2'-O-methylcytidine-3'-phosphate
  modified_base 9: mod_base = OTHER; note = 2'-fluorouridine-3'-phosphate
  modified_base 10: mod_base = OTHER; note = 2'-fluoroguanosine-3'-phosphate
  modified_base 11: mod_base = OTHER; note = 2'-fluoroadenosine-3'-phosphate
  modified_base 12: mod_base = OTHER; note = 2'-O-methyladenosine-3'-phosphate
  modified_base 13: mod_base = OTHER; note = 2'-O-methylcytidine-3'-phosphate
  modified_base 14: mod_base = OTHER; note = 2'-O-methyladenosine-3'-phosphate
  modified_base 15: mod_base = OTHER; note = 2'-O-methyluridine-3'-phosphate
  modified_base 16: mod_base = OTHER; note = 2'-O-methylguanosine-3'-phosphate
  modified_base 17: mod_base = OTHER; note = 2'-O-methylcytidine-3'-phosphate
  modified_base 18: mod_base = OTHER; note = 2'-O-methylcytidine-3'-phosphate
  modified_base 19: mod_base = OTHER; note = 2'-O-methyluridine-3'-phosphate
  modified_base 20: mod_base = OTHER; note = 2'-O-methyladenosine-3'-phosphate
  modified_base 21: mod_base = OTHER; note = 2'-O-methyladenosine-3'-phosphate attached to N-[tris(N-acetylgalactosamine-alkyl)-amidodecanoyl)]-4-hydr oxyprolinol Hyp-(N-acetylgalactosamine-alkyl)3
tccttcactgaacatgcctaa

SEQ ID NO: 3702 - RNA, 21 nt, synthetic construct
  misc_feature 1..21: note = Description of Artificial Sequence: Synthetic oligonucleotide
  source 1..21: mol_type = other RNA
  modified_base 1: mod_base = OTHER; note = 2'-O-methylcytidine-3'- phosphorothioate
  modified_base 2: mod_base = OTHER; note = 2'-O-methyladenosine-3'- phosphorothioate
  modified_base 3: mod_base = OTHER; note = 2'-O-methylcytidine-3'-phosphate
  modified_base 4: mod_base = OTHER; note = 2'-O-methyluridine-3'-phosphate
  modified_base 5: mod_base = OTHER; note = 2'-O-methylguanosine-3'-phosphate
  modified_base 6: mod_base = OTHER; note = 2'-O-methyladenosine-3'-phosphate
  modified_base 7: mod_base = OTHER; note = 2'-fluoroadenosine-3'-phosphate
  modified_base 8: mod_base = OTHER; note = 2'-O-methylcytidine-3'-phosphate
  modified_base 9: mod_base = OTHER; note = 2'-fluoroadenosine-3'-phosphate
  modified_base 10: mod_base = OTHER; note = 2'-fluorouridine-3'-phosphate
  modified_base 11: mod_base = OTHER; note = 2'-fluoroguanosine-3'-phosphate
  modified_base 12: mod_base = OTHER; note = 2'-O-methylcytidine-3'-phosphate
  modified_base 13: mod_base = OTHER; note = 2'-O-methylcytidine-3'-phosphate
  modified_base 14: mod_base = OTHER; note = 2'-O-methyluridine-3'-phosphate
  modified_base 15: mod_base = OTHER; note = 2'-O-methyladenosine-3'-phosphate
  modified_base 16: mod_base = OTHER; note = 2'-O-methylguanosine-3'-phosphate
  modified_base 17: mod_base = OTHER; note = 2'-O-methyluridine-3'-phosphate
  modified_base 18: mod_base = OTHER; note = 2'-O-methylcytidine-3'-phosphate
  modified_base 19: mod_base = OTHER; note = 2'-O-methylcytidine-3'-phosphate
  modified_base 20: mod_base = OTHER; note = 2'-O-methyladenosine-3'-phosphate
  modified_base 21: mod_base = OTHER; note = 2'-O-methyladenosine-3'-phosphate attached to N-[tris(N-acetylgalactosamine-alkyl)-amidodecanoyl)]-4-hydr oxyprolinol Hyp-(N-acetylgalactosamine-alkyl)3
cactgaacatgcctagtccaa

SEQ ID NO: 3703 - RNA, 21 nt, synthetic construct
  misc_feature 1..21: note = Description of Artificial Sequence: Synthetic oligonucleotide
  source 1..21: mol_type = other RNA
  modified_base 1: mod_base = OTHER; note = 2'-O-methyladenosine-3'- phosphorothioate
  modified_base 2: mod_base = OTHER; note = 2'-O-methyladenosine-3'- phosphorothioate
  modified_base 3: mod_base = OTHER; note = 2'-O-methylguanosine-3'-phosphate
  modified_base 4: mod_base = OTHER; note = 2'-O-methyluridine-3'-phosphate
  modified_base 5: mod_base = OTHER; note = 2'-O-methylguanosine-3'-phosphate
  modified_base 6: mod_base = OTHER; note = 2'-O-methyluridine-3'-phosphate
  modified_base 7: mod_base = OTHER; note = 2'-fluorouridine-3'-phosphate
  modified_base 8: mod_base = OTHER; note = 2'-O-methyladenosine-3'-phosphate
  modified_base 9: mod_base = OTHER; note = 2'-fluorouridine-3'-phosphate
  modified_base 10: mod_base = OTHER; note = 2'-fluoroadenosine-3'-phosphate
  modified_base 11: mod_base = OTHER; note = 2'-fluorocytidine-3'-phosphate
  modified_base 12: mod_base = OTHER; note = 2'-O-methylcytidine-3'-phosphate
  modified_base 13: mod_base = OTHER; note = 2'-O-methyladenosine-3'-phosphate
  modified_base 14: mod_base = OTHER; note = 2'-O-methyladenosine-3'-phosphate
  modified_base 15: mod_base = OTHER; note = 2'-O-methylcytidine-3'-phosphate
  modified_base 16: mod_base = OTHER; note = 2'-O-methyluridine-3'-phosphate
  modified_base 17: mod_base = OTHER; note = 2'-O-methyladenosine-3'-phosphate
  modified_base 18: mod_base = OTHER; note = 2'-O-methyladenosine-3'-phosphate
  modified_base 19: mod_base = OTHER; note = 2'-O-methyladenosine-3'-phosphate
  modified_base 20: mod_base = OTHER; note = 2'-O-methyladenosine-3'-phosphate
  modified_base 21: mod_base = OTHER; note = 2'-O-methylcytidine-3'-phosphate attached to N-[tris(N-acetylgalactosamine-alkyl)-amidodecanoyl)]-4-hydr oxyprolinol Hyp-(N-acetylgalactosamine-alkyl)3
aagtgttataccaactaaaac

SEQ ID NO: 3704 - RNA, 21 nt, synthetic construct
  misc_feature 1..21: note = Description of Artificial Sequence: Synthetic oligonucleotide
  source 1..21: mol_type = other RNA
  modified_base 1: mod_base = OTHER; note = 2'-O-methyluridine-3'-phosphorothioate
  modified_base 2: mod_base = OTHER; note = 2'-O-methyluridine-3'-phosphorothioate
  modified_base 3: mod_base = OTHER; note = 2'-O-methylcytidine-3'-phosphate
  modified_base 4: mod_base = OTHER; note = 2'-O-methylcytidine-3'-phosphate
  modified_base 5: mod_base = OTHER; note = 2'-O-methyladenosine-3'-phosphate
  modified_base 6: mod_base = OTHER; note = 2'-O-methylcytidine-3'-phosphate
  modified_base 7: mod_base = OTHER; note = 2'-fluorocytidine-3'-phosphate
  modified_base 8: mod_base = OTHER; note = 2'-O-methyladenosine-3'-phosphate
  modified_base 9: mod_base = OTHER; note = 2'-fluorouridine-3'-phosphate
  modified_base 10: mod_base = OTHER; note = 2'-fluoroguanosine-3'-phosphate
  modified_base 11: mod_base = OTHER; note = 2'-fluoroadenosine-3'-phosphate
  modified_base 12: mod_base = OTHER; note = 2'-O-methyluridine-3'-phosphate
  modified_base 13: mod_base = OTHER; note = 2'-O-methyluridine-3'-phosphate
  modified_base 14: mod_base = OTHER; note = 2'-O-methyladenosine-3'-phosphate
  modified_base 15: mod_base = OTHER; note = 2'-O-methyladenosine-3'-phosphate
  modified_base 16: mod_base = OTHER; note = 2'-O-methylguanosine-3'-phosphate
  modified_base 17: mod_base = OTHER; note = 2'-O-methylguanosine-3'-phosphate
  modified_base 18: mod_base = OTHER; note = 2'-O-methylguanosine-3'-phosphate
  modified_base 19: mod_base = OTHER; note = 2'-O-methyluridine-3'-phosphate
  modified_base 20: mod_base = OTHER; note = 2'-O-methylcytidine-3'-phosphate
  modified_base 21: mod_base = OTHER; note = 2'-O-methyluridine-3'-phosphate attached to N-[tris(N-acetylgalactosamine-alkyl)-amidodecanoyl)]-4-hydr oxyprolinol Hyp-(N-acetylgalactosamine-alkyl)3
ttccaccatgattaagggtct

SEQ ID NO: 3705 - RNA, 21 nt, synthetic construct
  misc_feature 1..21: note = Description of Artificial Sequence: Synthetic oligonucleotide
  source 1..21: mol_type = other RNA
  modified_base 1: mod_base = OTHER; note = 2'-O-methylguanosine-3'- phosphorothioate
  modified_base 2: mod_base = OTHER; note = 2'-O-methyladenosine-3'- phosphorothioate
  modified_base 3: mod_base = OTHER; note = 2'-O-methyladenosine-3'-phosphate
  modified_base 4: mod_base = OTHER; note = 2'-O-methylcytidine-3'-phosphate
  modified_base 5: mod_base = OTHER; note = 2'-O-methyladenosine-3'-phosphate
  modified_base 6: mod_base = OTHER; note = 2'-O-methyluridine-3'-phosphate
  modified_base 7: mod_base = OTHER; note = 2'-fluoroguanosine-3'-phosphate
  modified_base 8: mod_base = OTHER; note = 2'-O-methylcytidine-3'-phosphate
  modified_base 9: mod_base = OTHER; note = 2'-fluorocytidine-3'-phosphate
  modified_base 10: mod_base = OTHER; note = 2'-fluorouridine-3'-phosphate
  modified_base 11: mod_base = OTHER; note = 2'-fluoroadenosine-3'-phosphate
  modified_base 12: mod_base = OTHER; note = 2'-O-methylguanosine-3'-phosphate
  modified_base 13: mod_base = OTHER; note = 2'-O-methyluridine-3'-phosphate
  modified_base 14: mod_base = OTHER; note = 2'-O-methylcytidine-3'-phosphate
  modified_base 15: mod_base = OTHER; note = 2'-O-methylcytidine-3'-phosphate
  modified_base 16: mod_base = OTHER; note = 2'-O-methyladenosine-3'-phosphate
  modified_base 17: mod_base = OTHER; note = 2'-O-methyladenosine-3'-phosphate
  modified_base 18: mod_base = OTHER; note = 2'-O-methylcytidine-3'-phosphate
  modified_base 19: mod_base = OTHER; note = 2'-O-methyladenosine-3'-phosphate
  modified_base 20: mod_base = OTHER; note = 2'-O-methyluridine-3'-phosphate
  modified_base 21: mod_base = OTHER; note = 2'-O-methyluridine-3'-phosphate attached to N-[tris(N-acetylgalactosamine-alkyl)-amidodecanoyl)]-4-hydr oxyprolinol Hyp-(N-acetylgalactosamine-alkyl)3
gaacatgcctagtccaacatt

SEQ ID NO: 3706 - RNA, 21 nt, synthetic construct
  misc_feature 1..21: note = Description of Artificial Sequence: Synthetic oligonucleotide
  source 1..21: mol_type = other RNA
  modified_base 1: mod_base = OTHER; note = 2'-O-methyladenosine-3'- phosphorothioate
  modified_base 2: mod_base = OTHER; note = 2'-O-methyluridine-3'-phosphorothioate
  modified_base 3: mod_base = OTHER; note = 2'-O-methylcytidine-3'-phosphate
  modified_base 4: mod_base = OTHER; note = 2'-O-methyladenosine-3'-phosphate
  modified_base 5: mod_base = OTHER; note = 2'-O-methylguanosine-3'-phosphate
  modified_base 6: mod_base = OTHER; note = 2'-O-methyluridine-3'-phosphate
  modified_base 7: mod_base = OTHER; note = 2'-fluoroadenosine-3'-phosphate
  modified_base 8: mod_base = OTHER; note = 2'-O-methylguanosine-3'-phosphate
  modified_base 9: mod_base = OTHER; note = 2'-fluorouridine-3'-phosphate
  modified_base 10: mod_base = OTHER; note = 2'-fluoroguanosine-3'-phosphate
  modified_base 11: mod_base = OTHER; note = 2'-fluorouridine-3'-phosphate
  modified_base 12: mod_base = OTHER; note = 2'-O-methyladenosine-3'-phosphate
  modified_base 13: mod_base = OTHER; note = 2'-O-methylcytidine-3'-phosphate
  modified_base 14: mod_base = OTHER; note = 2'-O-methyladenosine-3'-phosphate
  modified_base 15: mod_base = OTHER; note = 2'-O-methyluridine-3'-phosphate
  modified_base 16: mod_base = OTHER; note = 2'-O-methyluridine-3'-phosphate
  modified_base 17: mod_base = OTHER; note = 2'-O-methyladenosine-3'-phosphate
  modified_base 18: mod_base = OTHER; note = 2'-O-methylcytidine-3'-phosphate
  modified_base 19: mod_base = OTHER; note = 2'-O-methylcytidine-3'-phosphate
  modified_base 20: mod_base = OTHER; note = 2'-O-methyladenosine-3'-phosphate
  modified_base 21: mod_base = OTHER; note = 2'-O-methyluridine-3'-phosphate attached to N-[tris(N-acetylgalactosamine-alkyl)-amidodecanoyl)]-4-hydr oxyprolinol Hyp-(N-acetylgalactosamine-alkyl)3
atcagtagtgtacattaccat

SEQ ID NO: 3707 - RNA, 21 nt, synthetic construct
  misc_feature 1..21: note = Description of Artificial Sequence: Synthetic oligonucleotide
  source 1..21: mol_type = other RNA
  modified_base 1: mod_base = OTHER; note = 2'-O-methyladenosine-3'- phosphorothioate
  modified_base 2: mod_base = OTHER; note = 2'-O-methyluridine-3'-phosphorothioate
  modified_base 3: mod_base = OTHER; note = 2'-O-methylcytidine-3'-phosphate
  modified_base 4: mod_base = OTHER; note = 2'-O-methylcytidine-3'-phosphate
  modified_base 5: mod_base = OTHER; note = 2'-O-methyladenosine-3'-phosphate
  modified_base 6: mod_base = OTHER; note = 2'-O-methyladenosine-3'-phosphate
  modified_base 7: mod_base = OTHER; note = 2'-fluoroguanosine-3'-phosphate
  modified_base 8: mod_base = OTHER; note = 2'-O-methyluridine-3'-phosphate
  modified_base 9: mod_base = OTHER; note = 2'-fluoroguanosine-3'-phosphate
  modified_base 10: mod_base = OTHER; note = 2'-fluorouridine-3'-phosphate
  modified_base 11: mod_base = OTHER; note = 2'-fluorouridine-3'-phosphate
  modified_base 12: mod_base = OTHER; note = 2'-O-methyladenosine-3'-phosphate
  modified_base 13: mod_base = OTHER; note = 2'-O-methyluridine-3'-phosphate
  modified_base 14: mod_base = OTHER; note = 2'-O-methyladenosine-3'-phosphate
  modified_base 15: mod_base = OTHER; note = 2'-O-methylcytidine-3'-phosphate
  modified_base 16: mod_base = OTHER; note = 2'-O-methylcytidine-3'-phosphate
  modified_base 17: mod_base = OTHER; note = 2'-O-methyladenosine-3'-phosphate
  modified_base 18: mod_base = OTHER; note = 2'-O-methyladenosine-3'-phosphate
  modified_base 19: mod_base = OTHER; note = 2'-O-methylcytidine-3'-phosphate
  modified_base 20: mod_base = OTHER; note = 2'-O-methyluridine-3'-phosphate
  modified_base 21: mod_base = OTHER; note = 2'-O-methyladenosine-3'-phosphate attached to N-[tris(N-acetylgalactosamine-alkyl)-amidodecanoyl)]-4-hydr oxyprolinol Hyp-(N-acetylgalactosamine-alkyl)3
atccaagtgttataccaacta

SEQ ID NO: 3708 - RNA, 21 nt, synthetic construct
  misc_feature 1..21: note = Description of Artificial Sequence: Synthetic oligonucleotide
  source 1..21: mol_type = other RNA
  modified_base 1: mod_base = OTHER; note = 2'-O-methylcytidine-3'- phosphorothioate
  modified_base 2: mod_base = OTHER; note = 2'-O-methylcytidine-3'- phosphorothioate
  modified_base 3: mod_base = OTHER; note = 2'-O-methyladenosine-3'-phosphate
  modified_base 4: mod_base = OTHER; note = 2'-O-methyladenosine-3'-phosphate
  modified_base 5: mod_base = OTHER; note = 2'-O-methylguanosine-3'-phosphate
  modified_base 6: mod_base = OTHER; note = 2'-O-methyluridine-3'-phosphate
  modified_base 7: mod_base = OTHER; note = 2'-fluorocytidine-3'-phosphate
  modified_base 8: mod_base = OTHER; note = 2'-O-methylcytidine-3'-phosphate
  modified_base 9: mod_base = OTHER; note = 2'-fluoroadenosine-3'-phosphate
  modified_base 10: mod_base = OTHER; note = 2'-fluoroadenosine-3'-phosphate
  modified_base 11: mod_base = OTHER; note = 2'-fluorouridine-3'-phosphate
  modified_base 12: mod_base = OTHER; note = 2'-O-methyladenosine-3'-phosphate
  modified_base 13: mod_base = OTHER; note = 2'-O-methyluridine-3'-phosphate
  modified_base 14: mod_base = OTHER; note = 2'-O-methylguanosine-3'-phosphate
  modified_base 15: mod_base = OTHER; note = 2'-O-methylguanosine-3'-phosphate
  modified_base 16: mod_base = OTHER; note = 2'-O-methylcytidine-3'-phosphate
  modified_base 17: mod_base = OTHER; note = 2'-O-methyladenosine-3'-phosphate
  modified_base 18: mod_base = OTHER; note = 2'-O-methyladenosine-3'-phosphate
  modified_base 19: mod_base = OTHER; note = 2'-O-methylcytidine-3'-phosphate
  modified_base 20: mod_base = OTHER; note = 2'-O-methyluridine-3'-phosphate
  modified_base 21: mod_base = OTHER; note = 2'-O-methyladenosine-3'-phosphate attached to N-[tris(N-acetylgalactosamine-alkyl)-amidodecanoyl)]-4-hydr oxyprolinol Hyp-(N-acetylgalactosamine-alkyl)3
ccaagtccaatatggcaacta

SEQ ID NO: 3709 - RNA, 21 nt, synthetic construct
  misc_feature 1..21: note = Description of Artificial Sequence: Synthetic oligonucleotide
  source 1..21: mol_type = other RNA
  modified_base 1: mod_base = OTHER; note = 2'-O-methylcytidine-3'- phosphorothioate
  modified_base 2: mod_base = OTHER; note = 2'-O-methyladenosine-3'- phosphorothioate
  modified_base 3: mod_base = OTHER; note = 2'-O-methyluridine-3'-phosphate
  modified_base 4: mod_base = OTHER; note = 2'-O-methyluridine-3'-phosphate
  modified_base 5: mod_base = OTHER; note = 2'-O-methyluridine-3'-phosphate
  modified_base 6: mod_base = OTHER; note = 2'-O-methylcytidine-3'-phosphate
  modified_base 7: mod_base = OTHER; note = 2'-fluoroadenosine-3'-phosphate
  modified_base 8: mod_base = OTHER; note = 2'-O-methylcytidine-3'-phosphate
  modified_base 9: mod_base = OTHER; note = 2'-fluorouridine-3'-phosphate
  modified_base 10: mod_base = OTHER; note = 2'-fluoroguanosine-3'-phosphate
  modified_base 11: mod_base = OTHER; note = 2'-fluorouridine-3'-phosphate
  modified_base 12: mod_base = OTHER; note = 2'-O-methylcytidine-3'-phosphate
  modified_base 13: mod_base = OTHER; note = 2'-O-methyluridine-3'-phosphate
  modified_base 14: mod_base = OTHER; note = 2'-O-methyladenosine-3'-phosphate
  modified_base 15: mod_base = OTHER; note = 2'-O-methylguanosine-3'-phosphate
  modified_base 16: mod_base = OTHER; note = 2'-O-methylguanosine-3'-phosphate
  modified_base 17: mod_base = OTHER; note = 2'-O-methylcytidine-3'-phosphate
  modified_base 18: mod_base = OTHER; note = 2'-O-methyluridine-3'-phosphate
  modified_base 19: mod_base = OTHER; note = 2'-O-methyladenosine-3'-phosphate
  modified_base 20: mod_base = OTHER; note = 2'-O-methylcytidine-3'-phosphate
  modified_base 21: mod_base = OTHER; note = 2'-O-methyladenosine-3'-phosphate attached to N-[tris(N-acetylgalactosamine-alkyl)-amidodecanoyl)]-4-hydr oxyprolinol Hyp-(N-acetylgalactosamine-alkyl)3
catttcactgtctaggctaca

SEQ ID NO: 3710 - RNA, 21 nt, synthetic construct
  misc_feature 1..21: note = Description of Artificial Sequence: Synthetic oligonucleotide
  source 1..21: mol_type = other RNA
  modified_base 1: mod_base = OTHER; note = 2'-O-methylcytidine-3'- phosphorothioate
  modified_base 2: mod_base = OTHER; note = 2'-O-methylcytidine-3'- phosphorothioate
  modified_base 3: mod_base = OTHER; note = 2'-O-methyladenosine-3'-phosphate
  modified_base 4: mod_base = OTHER; note = 2'-O-methylcytidine-3'-phosphate
  modified_base 5: mod_base = OTHER; note = 2'-O-methyladenosine-3'-phosphate
  modified_base 6: mod_base = OTHER; note = 2'-O-methylguanosine-3'-phosphate
  modified_base 7: mod_base = OTHER; note = 2'-fluorocytidine-3'-phosphate
  modified_base 8: mod_base = OTHER; note = 2'-O-methyluridine-3'-phosphate
  modified_base 9: mod_base = OTHER; note = 2'-fluoroadenosine-3'-phosphate
  modified_base 10: mod_base = OTHER; note = 2'-fluorouridine-3'-phosphate
  modified_base 11: mod_base = OTHER; note = 2'-fluoroadenosine-3'-phosphate
  modified_base 12: mod_base = OTHER; note = 2'-O-methyluridine-3'-phosphate
  modified_base 13: mod_base = OTHER; note = 2'-O-methylcytidine-3'-phosphate
  modified_base 14: mod_base = OTHER; note = 2'-O-methylcytidine-3'-phosphate
  modified_base 15: mod_base = OTHER; note = 2'-O-methyluridine-3'-phosphate
  modified_base 16: mod_base = OTHER; note = 2'-O-methylguanosine-3'-phosphate
  modified_base 17: mod_base = OTHER; note = 2'-O-methyladenosine-3'-phosphate
  modified_base 18: mod_base = OTHER; note = 2'-O-methyluridine-3'-phosphate
  modified_base 19: mod_base = OTHER; note = 2'-O-methylguanosine-3'-phosphate
  modified_base 20: mod_base = OTHER; note = 2'-O-methylcytidine-3'-phosphate
  modified_base 21: mod_base = OTHER; note = 2'-O-methyluridine-3'-phosphate attached to N-[tris(N-acetylgalactosamine-alkyl)-amidodecanoyl)]-4-hydr oxyprolinol Hyp-(N-acetylgalactosamine-alkyl)3
ccacagctatatcctgatgct

SEQ ID NO: 3711 - RNA, 21 nt, synthetic construct
  misc_feature 1..21: note = Description of Artificial Sequence: Synthetic oligonucleotide
  source 1..21: mol_type = other RNA
  modified_base 1: mod_base = OTHER; note = 2'-O-methylcytidine-3'- phosphorothioate
  modified_base 2: mod_base = OTHER; note = 2'-O-methyluridine-3'-phosphorothioate
  modified_base 3: mod_base = OTHER; note = 2'-O-methyluridine-3'-phosphate
  modified_base 4: mod_base = OTHER; note = 2'-O-methylcytidine-3'-phosphate
  modified_base 5: mod_base = OTHER; note = 2'-O-methyladenosine-3'-phosphate
  modified_base 6: mod_base = OTHER; note = 2'-O-methylcytidine-3'-phosphate
  modified_base 7: mod_base = OTHER; note = 2'-fluorouridine-3'-phosphate
  modified_base 8: mod_base = OTHER; note = 2'-O-methylguanosine-3'-phosphate
  modified_base 9: mod_base = OTHER; note = 2'-fluoroadenosine-3'-phosphate
  modified_base 10: mod_base = OTHER; note = 2'-fluoroadenosine-3'-phosphate
  modified_base 11: mod_base = OTHER; note = 2'-fluorocytidine-3'-phosphate
  modified_base 12: mod_base = OTHER; note = 2'-O-methyladenosine-3'-phosphate
  modified_base 13: mod_base = OTHER; note = 2'-O-methyluridine-3'-phosphate
  modified_base 14: mod_base = OTHER; note = 2'-O-methylguanosine-3'-phosphate
  modified_base 15: mod_base = OTHER; note = 2'-O-methylcytidine-3'-phosphate
  modified_base 16: mod_base = OTHER; note = 2'-O-methylcytidine-3'-phosphate
  modified_base 17: mod_base = OTHER; note = 2'-O-methyluridine-3'-phosphate
  modified_base 18: mod_base = OTHER; note = 2'-O-methyladenosine-3'-phosphate
  modified_base 19: mod_base = OTHER; note = 2'-O-methylguanosine-3'-phosphate
  modified_base 20: mod_base = OTHER; note = 2'-O-methyluridine-3'-phosphate
  modified_base 21: mod_base = OTHER; note = 2'-O-methyladenosine-3'-phosphate attached to N-[tris(N-acetylgalactosamine-alkyl)-amidodecanoyl)]-4-hydr oxyprolinol Hyp-(N-acetylgalactosamine-alkyl)3
cttcactgaacatgcctagta

SEQ ID NO: 3712 - RNA, 21 nt, synthetic construct
  misc_feature 1..21: note = Description of Artificial Sequence: Synthetic oligonucleotide
  source 1..21: mol_type = other RNA
  modified_base 1: mod_base = OTHER; note = 2'-O-methylguanosine-3'- phosphorothioate
  modified_base 2: mod_base = OTHER; note = 2'-O-methyluridine-3'-phosphorothioate
  modified_base 3: mod_base = OTHER; note = 2'-O-methylguanosine-3'-phosphate
  modified_base 4: mod_base = OTHER; note = 2'-O-methylguanosine-3'-phosphate
  modified_base 5: mod_base = OTHER; note = 2'-O-methyluridine-3'-phosphate
  modified_base 6: mod_base = OTHER; note = 2'-O-methyluridine-3'-phosphate
  modified_base 7: mod_base = OTHER; note = 2'-fluoroguanosine-3'-phosphate
  modified_base 8: mod_base = OTHER; note = 2'-O-methyladenosine-3'-phosphate
  modified_base 9: mod_base = OTHER; note = 2'-fluoroguanosine-3'-phosphate
  modified_base 10: mod_base = OTHER; note = 2'-fluoroadenosine-3'-phosphate
  modified_base 11: mod_base = OTHER; note = 2'-fluoroguanosine-3'-phosphate
  modified_base 12: mod_base = OTHER; note = 2'-O-methyluridine-3'-phosphate
  modified_base 13: mod_base = OTHER; note = 2'-O-methylguanosine-3'-phosphate
  modified_base 14: mod_base = OTHER; note = 2'-O-methylcytidine-3'-phosphate
  modified_base 15: mod_base = OTHER; note = 2'-O-methyluridine-3'-phosphate
  modified_base 16: mod_base = OTHER; note = 2'-O-methyluridine-3'-phosphate
  modified_base 17: mod_base = OTHER; note = 2'-O-methyladenosine-3'-phosphate
  modified_base 18: mod_base = OTHER; note = 2'-O-methyluridine-3'-phosphate
  modified_base 19: mod_base = OTHER; note = 2'-O-methylguanosine-3'-phosphate
  modified_base 20: mod_base = OTHER; note = 2'-O-methyladenosine-3'-phosphate
  modified_base 21: mod_base = OTHER; note = 2'-O-methyladenosine-3'-phosphate attached to N-[tris(N-acetylgalactosamine-alkyl)-amidodecanoyl)]-4-hydr oxyprolinol Hyp-(N-acetylgalactosamine-alkyl)3
gtggttgagagtgcttatgaa

SEQ ID NO: 3713 - RNA, 21 nt, synthetic construct
  misc_feature 1..21: note = Description of Artificial Sequence: Synthetic oligonucleotide
  source 1..21: mol_type = other RNA
  modified_base 1: mod_base = OTHER; note = 2'-O-methyladenosine-3'- phosphorothioate
  modified_base 2: mod_base = OTHER; note = 2'-O-methyluridine-3'-phosphorothioate
  modified_base 3: mod_base = OTHER; note = 2'-O-methyladenosine-3'-phosphate
  modified_base 4: mod_base = OTHER; note = 2'-O-methyluridine-3'-phosphate
  modified_base 5: mod_base = OTHER; note = 2'-O-methylcytidine-3'-phosphate
  modified_base 6: mod_base = OTHER; note = 2'-O-methyladenosine-3'-phosphate
  modified_base 7: mod_base = OTHER; note = 2'-fluoroguanosine-3'-phosphate
  modified_base 8: mod_base = OTHER; note = 2'-O-methyluridine-3'-phosphate
  modified_base 9: mod_base = OTHER; note = 2'-fluoroadenosine-3'-phosphate
  modified_base 10: mod_base = OTHER; note = 2'-fluoroguanosine-3'-phosphate
  modified_base 11: mod_base = OTHER; note = 2'-fluorouridine-3'-phosphate
  modified_base 12: mod_base = OTHER; note = 2'-O-methylguanosine-3'-phosphate
  modified_base 13: mod_base = OTHER; note = 2'-O-methyluridine-3'-phosphate
  modified_base 14: mod_base = OTHER; note = 2'-O-methyladenosine-3'-phosphate
  modified_base 15: mod_base = OTHER; note = 2'-O-methylcytidine-3'-phosphate
  modified_base 16: mod_base = OTHER; note = 2'-O-methyladenosine-3'-phosphate
  modified_base 17: mod_base = OTHER; note = 2'-O-methyluridine-3'-phosphate
  modified_base 18: mod_base = OTHER; note = 2'-O-methyluridine-3'-phosphate
  modified_base 19: mod_base = OTHER; note = 2'-O-methyladenosine-3'-phosphate
  modified_base 20: mod_base = OTHER; note = 2'-O-methylcytidine-3'-phosphate
  modified_base 21: mod_base = OTHER; note = 2'-O-methyladenosine-3'-phosphate attached to N-[tris(N-acetylgalactosamine-alkyl)-amidodecanoyl)]-4-hydr oxyprolinol Hyp-(N-acetylgalactosamine-alkyl)3
atatcagtagtgtacattaca

SEQ ID NO: 3714 - RNA, 21 nt, synthetic construct
  misc_feature 1..21: note = Description of Artificial Sequence: Synthetic oligonucleotide
  source 1..21: mol_type = other RNA
  modified_base 1: mod_base = OTHER; note = 2'-O-methylcytidine-3'- phosphorothioate
  modified_base 2: mod_base = OTHER; note = 2'-O-methyladenosine-3'- phosphorothioate
  modified_base 3: mod_base = OTHER; note = 2'-O-methyladenosine-3'-phosphate
  modified_base 4: mod_base = OTHER; note = 2'-O-methylcytidine-3'-phosphate
  modified_base 5: mod_base = OTHER; note = 2'-O-methylcytidine-3'-phosphate
  modified_base 6: mod_base = OTHER; note = 2'-O-methyladenosine-3'-phosphate
  modified_base 7: mod_base = OTHER; note = 2'-fluoroadenosine-3'-phosphate
  modified_base 8: mod_base = OTHER; note = 2'-O-methylcytidine-3'-phosphate
  modified_base 9: mod_base = OTHER; note = 2'-fluorouridine-3'-phosphate
  modified_base 10: mod_base = OTHER; note = 2'-fluoroadenosine-3'-phosphate
  modified_base 11: mod_base = OTHER; note = 2'-fluorouridine-3'-phosphate
  modified_base 12: mod_base = OTHER; note = 2'-O-methylcytidine-3'-phosphate
  modified_base 13: mod_base = OTHER; note = 2'-O-methylcytidine-3'-phosphate
  modified_base 14: mod_base = OTHER; note = 2'-O-methyladenosine-3'-phosphate
  modified_base 15: mod_base = OTHER; note = 2'-O-methyladenosine-3'-phosphate
  modified_base 16: mod_base = OTHER; note = 2'-O-methylguanosine-3'-phosphate
  modified_base 17: mod_base = OTHER; note = 2'-O-methyluridine-3'-phosphate
  modified_base 18: mod_base = OTHER; note = 2'-O-methylguanosine-3'-phosphate
  modified_base 19: mod_base = OTHER; note = 2'-O-methyluridine-3'-phosphate
  modified_base 20: mod_base = OTHER; note = 2'-O-methyluridine-3'-phosphate
  modified_base 21: mod_base = OTHER; note = 2'-O-methyladenosine-3'-phosphate attached to N-[tris(N-acetylgalactosamine-alkyl)-amidodecanoyl)]-4-hydr oxyprolinol Hyp-(N-acetylgalactosamine-alkyl)3
caaccaactatccaagtgtta

SEQ ID NO: 3715 - RNA, 21 nt, synthetic construct
  misc_feature 1..21: note = Description of Artificial Sequence: Synthetic oligonucleotide
  source 1..21: mol_type = other RNA
  modified_base 1: mod_base = OTHER; note = 2'-O-methylguanosine-3'- phosphorothioate
  modified_base 2: mod_base = OTHER; note = 2'-O-methylcytidine-3'- phosphorothioate
  modified_base 3: mod_base = OTHER; note = 2'-O-methyladenosine-3'-phosphate
  modified_base 4: mod_base = OTHER; note = 2'-O-methylguanosine-3'-phosphate
  modified_base 5: mod_base = OTHER; note = 2'-O-methyladenosine-3'-phosphate
  modified_base 6: mod_base = OTHER; note = 2'-O-methyluridine-3'-phosphate
  modified_base 7: mod_base = OTHER; note = 2'-fluorouridine-3'-phosphate
  modified_base 8: mod_base = OTHER; note = 2'-O-methyluridine-3'-phosphate
  modified_base 9: mod_base = OTHER; note = 2'-fluoroguanosine-3'-phosphate
  modified_base 10: mod_base = OTHER; note = 2'-fluoroguanosine-3'-phosphate
  modified_base 11: mod_base = OTHER; note = 2'-fluorocytidine-3'-phosphate
  modified_base 12: mod_base = OTHER; note = 2'-O-methyladenosine-3'-phosphate
  modified_base 13: mod_base = OTHER; note = 2'-O-methylguanosine-3'-phosphate
  modified_base 14: mod_base = OTHER; note = 2'-O-methyladenosine-3'-phosphate
  modified_base 15: mod_base = OTHER; note = 2'-O-methylguanosine-3'-phosphate
  modified_base 16: mod_base = OTHER; note = 2'-O-methyladenosine-3'-phosphate
  modified_base 17: mod_base = OTHER; note = 2'-O-methylguanosine-3'-phosphate
  modified_base 18: mod_base = OTHER; note = 2'-O-methyluridine-3'-phosphate
  modified_base 19: mod_base = OTHER; note = 2'-O-methyladenosine-3'-phosphate
  modified_base 20: mod_base = OTHER; note = 2'-O-methyluridine-3'-phosphate
  modified_base 21: mod_base = OTHER; note = 2'-O-methyladenosine-3'-phosphate attached to N-[tris(N-acetylgalactosamine-alkyl)-amidodecanoyl)]-4-hydr oxyprolinol Hyp-(N-acetylgalactosamine-alkyl)3
gcagatttggcagagagtata

SEQ ID NO: 3716 - RNA, 21 nt, synthetic construct
  misc_feature 1..21: note = Description of Artificial Sequence: Synthetic oligonucleotide
  source 1..21: mol_type = other RNA
  modified_base 1: mod_base = OTHER; note = 2'-O-methylcytidine-3'- phosphorothioate
  modified_base 2: mod_base = OTHER; note = 2'-O-methyluridine-3'-phosphorothioate
  modified_base 3: mod_base = OTHER; note = 2'-O-methylcytidine-3'-phosphate
  modified_base 4: mod_base = OTHER; note = 2'-O-methylcytidine-3'-phosphate
  modified_base 5: mod_base = OTHER; note = 2'-O-methyluridine-3'-phosphate
  modified_base 6: mod_base = OTHER; note = 2'-O-methyluridine-3'-phosphate
  modified_base 7: mod_base = OTHER; note = 2'-fluorocytidine-3'-phosphate
  modified_base 8: mod_base = OTHER; note = 2'-O-methyladenosine-3'-phosphate
  modified_base 9: mod_base = OTHER; note = 2'-fluorocytidine-3'-phosphate
  modified_base 10: mod_base = OTHER; note = 2'-fluorouridine-3'-phosphate
  modified_base 11: mod_base = OTHER; note = 2'-fluoroguanosine-3'-phosphate
  modified_base 12: mod_base = OTHER; note = 2'-O-methyladenosine-3'-phosphate
  modified_base 13: mod_base = OTHER; note = 2'-O-methyladenosine-3'-phosphate
  modified_base 14: mod_base = OTHER; note = 2'-O-methylcytidine-3'-phosphate
  modified_base 15: mod_base = OTHER; note = 2'-O-methyladenosine-3'-phosphate
  modified_base 16: mod_base = OTHER; note = 2'-O-methyluridine-3'-phosphate
  modified_base 17: mod_base = OTHER; note = 2'-O-methylguanosine-3'-phosphate
  modified_base 18: mod_base = OTHER; note = 2'-O-methylcytidine-3'-phosphate
  modified_base 19: mod_base = OTHER; note = 2'-O-methylcytidine-3'-phosphate
  modified_base 20: mod_base = OTHER; note = 2'-O-methyluridine-3'-phosphate
  modified_base 21: mod_base = OTHER; note = 2'-O-methyladenosine-3'-phosphate attached to N-[tris(N-acetylgalactosamine-alkyl)-amidodecanoyl)]-4-hydr oxyprolinol Hyp-(N-acetylgalactosamine-alkyl)3
ctccttcactgaacatgccta

SEQ ID NO: 3717 - RNA, 21 nt, synthetic construct
  misc_feature 1..21: note = Description of Artificial Sequence: Synthetic oligonucleotide
  source 1..21: mol_type = other RNA
  modified_base 1: mod_base = OTHER; note = 2'-O-methylcytidine-3'- phosphorothioate
  modified_base 2: mod_base = OTHER; note = 2'-O-methyladenosine-3'- phosphorothioate
  modified_base 3: mod_base = OTHER; note = 2'-O-methyluridine-3'-phosphate
  modified_base 4: mod_base = OTHER; note = 2'-O-methylguanosine-3'-phosphate
  modified_base 5: mod_base = OTHER; note = 2'-O-methylcytidine-3'-phosphate
  modified_base 6: mod_base = OTHER; note = 2'-O-methylcytidine-3'-phosphate
  modified_base 7: mod_base = OTHER; note = 2'-fluorouridine-3'-phosphate
  modified_base 8: mod_base = OTHER; note = 2'-O-methyladenosine-3'-phosphate
  modified_base 9: mod_base = OTHER; note = 2'-fluoroguanosine-3'-phosphate
  modified_base 10: mod_base = OTHER; note = 2'-fluorouridine-3'-phosphate
  modified_base 11: mod_base = OTHER; note = 2'-fluorocytidine-3'-phosphate
  modified_base 12: mod_base = OTHER; note = 2'-O-methylcytidine-3'-phosphate
  modified_base 13: mod_base = OTHER; note = 2'-O-methyladenosine-3'-phosphate
  modified_base 14: mod_base = OTHER; note = 2'-O-methyladenosine-3'-phosphate
  modified_base 15: mod_base = OTHER; note = 2'-O-methylcytidine-3'-phosphate
  modified_base 16: mod_base = OTHER; note = 2'-O-methyladenosine-3'-phosphate
  modified_base 17: mod_base = OTHER; note = 2'-O-methyluridine-3'-phosphate
  modified_base 18: mod_base = OTHER; note = 2'-O-methyluridine-3'-phosphate
  modified_base 19: mod_base = OTHER; note = 2'-O-methyluridine-3'-phosphate
  modified_base 20: mod_base = OTHER; note = 2'-O-methyluridine-3'-phosphate
  modified_base 21: mod_base = OTHER; note = 2'-O-methyluridine-3'-phosphate attached to N-[tris(N-acetylgalactosamine-alkyl)-amidodecanoyl)]-4-hydr oxyprolinol Hyp-(N-acetylgalactosamine-alkyl)3
catgcctagtccaacattttt

SEQ ID NO: 3718 - RNA, 21 nt, synthetic construct
  misc_feature 1..21: note = Description of Artificial Sequence: Synthetic oligonucleotide
  source 1..21: mol_type = other RNA
  modified_base 1: mod_base = OTHER; note = 2'-O-methyluridine-3'-phosphorothioate
  modified_base 2: mod_base = OTHER; note = 2'-O-methylguanosine-3'- phosphorothioate
  modified_base 3: mod_base = OTHER; note = 2'-O-methylcytidine-3'-phosphate
  modified_base 4: mod_base = OTHER; note = 2'-O-methylcytidine-3'-phosphate
  modified_base 5: mod_base = OTHER; note = 2'-O-methyladenosine-3'-phosphate
  modified_base 6: mod_base = OTHER; note = 2'-O-methyluridine-3'-phosphate
  modified_base 7: mod_base = OTHER; note = 2'-fluorocytidine-3'-phosphate
  modified_base 8: mod_base = OTHER; note = 2'-O-methyladenosine-3'-phosphate
  modified_base 9: mod_base = OTHER; note = 2'-fluoroguanosine-3'-phosphate
  modified_base 10: mod_base = OTHER; note = 2'-fluorouridine-3'-phosphate
  modified_base 11: mod_base = OTHER; note = 2'-fluoroadenosine-3'-phosphate
  modified_base 12: mod_base = OTHER; note = 2'-O-methyluridine-3'-phosphate
  modified_base 13: mod_base = OTHER; note = 2'-O-methylcytidine-3'-phosphate
  modified_base 14: mod_base = OTHER; note = 2'-O-methyluridine-3'-phosphate
  modified_base 15: mod_base = OTHER; note = 2'-O-methyluridine-3'-phosphate
  modified_base 16: mod_base = OTHER; note = 2'-O-methyladenosine-3'-phosphate
  modified_base 17: mod_base = OTHER; note = 2'-O-methyladenosine-3'-phosphate
  modified_base 18: mod_base = OTHER; note = 2'-O-methyluridine-3'-phosphate
  modified_base 19: mod_base = OTHER; note = 2'-O-methylguanosine-3'-phosphate
  modified_base 20: mod_base = OTHER; note = 2'-O-methyladenosine-3'-phosphate
  modified_base 21: mod_base = OTHER; note = 2'-O-methyladenosine-3'-phosphate attached to N-[tris(N-acetylgalactosamine-alkyl)-amidodecanoyl)]-4-hydr oxyprolinol Hyp-(N-acetylgalactosamine-alkyl)3
tgccatcagtatcttaatgaa

SEQ ID NO: 3719 - RNA, 21 nt, synthetic construct
  misc_feature 1..21: note = Description of Artificial Sequence: Synthetic oligonucleotide
  source 1..21: mol_type = other RNA
  modified_base 1: mod_base = OTHER; note = 2'-O-methylguanosine-3'- phosphorothioate
  modified_base 2: mod_base = OTHER; note = 2'-O-methylcytidine-3'- phosphorothioate
  modified_base 3: mod_base = OTHER; note = 2'-O-methylcytidine-3'-phosphate
  modified_base 4: mod_base = OTHER; note = 2'-O-methyladenosine-3'-phosphate
  modified_base 5: mod_base = OTHER; note = 2'-O-methyluridine-3'-phosphate
  modified_base 6: mod_base = OTHER; note = 2'-O-methylcytidine-3'-phosphate
  modified_base 7: mod_base = OTHER; note = 2'-fluoroadenosine-3'-phosphate
  modified_base 8: mod_base = OTHER; note = 2'-O-methylguanosine-3'-phosphate
  modified_base 9: mod_base = OTHER; note = 2'-fluorouridine-3'-phosphate
  modified_base 10: mod_base = OTHER; note = 2'-fluoroadenosine-3'-phosphate
  modified_base 11: mod_base = OTHER; note = 2'-fluorouridine-3'-phosphate
  modified_base 12: mod_base = OTHER; note = 2'-O-methylcytidine-3'-phosphate
  modified_base 13: mod_base = OTHER; note = 2'-O-methyluridine-3'-phosphate
  modified_base 14: mod_base = OTHER; note = 2'-O-methyluridine-3'-phosphate
  modified_base 15: mod_base = OTHER; note = 2'-O-methyladenosine-3'-phosphate
  modified_base 16: mod_base = OTHER; note = 2'-O-methyladenosine-3'-phosphate
  modified_base 17: mod_base = OTHER; note = 2'-O-methyluridine-3'-phosphate
  modified_base 18: mod_base = OTHER; note = 2'-O-methylguanosine-3'-phosphate
  modified_base 19: mod_base = OTHER; note = 2'-O-methyladenosine-3'-phosphate
  modified_base 20: mod_base = OTHER; note = 2'-O-methyladenosine-3'-phosphate
  modified_base 21: mod_base = OTHER; note = 2'-O-methyladenosine-3'-phosphate attached to N-[tris(N-acetylgalactosamine-alkyl)-amidodecanoyl)]-4-hydr oxyprolinol Hyp-(N-acetylgalactosamine-alkyl)3
gccatcagtatcttaatgaaa

SEQ ID NO: 3720 - RNA, 21 nt, synthetic construct
  misc_feature 1..21: note = Description of Artificial Sequence: Synthetic oligonucleotide
  source 1..21: mol_type = other RNA
  modified_base 1: mod_base = OTHER; note = 2'-O-methyluridine-3'-phosphorothioate
  modified_base 2: mod_base = OTHER; note = 2'-O-methyluridine-3'-phosphorothioate
  modified_base 3: mod_base = OTHER; note = 2'-O-methyladenosine-3'-phosphate
  modified_base 4: mod_base = OTHER; note = 2'-O-methylguanosine-3'-phosphate
  modified_base 5: mod_base = OTHER; note = 2'-O-methyladenosine-3'-phosphate
  modified_base 6: mod_base = OTHER; note = 2'-O-methyladenosine-3'-phosphate
  modified_base 7: mod_base = OTHER; note = 2'-fluorocytidine-3'-phosphate
  modified_base 8: mod_base = OTHER; note = 2'-O-methyladenosine-3'-phosphate
  modified_base 9: mod_base = OTHER; note = 2'-fluorocytidine-3'-phosphate
  modified_base 10: mod_base = OTHER; note = 2'-fluorocytidine-3'-phosphate
  modified_base 11: mod_base = OTHER; note = 2'-fluoroadenosine-3'-phosphate
  modified_base 12: mod_base = OTHER; note = 2'-O-methyladenosine-3'-phosphate
  modified_base 13: mod_base = OTHER; note = 2'-O-methyladenosine-3'-phosphate
  modified_base 14: mod_base = OTHER; note = 2'-O-methylguanosine-3'-phosphate
  modified_base 15: mod_base = OTHER; note = 2'-O-methyladenosine-3'-phosphate
  modified_base 16: mod_base = OTHER; note = 2'-O-methyluridine-3'-phosphate
  modified_base 17: mod_base = OTHER; note = 2'-O-methyluridine-3'-phosphate
  modified_base 18: mod_base = OTHER; note = 2'-O-methylguanosine-3'-phosphate
  modified_base 19: mod_base = OTHER; note = 2'-O-methyluridine-3'-phosphate
  modified_base 20: mod_base = OTHER; note = 2'-O-methylcytidine-3'-phosphate
  modified_base 21: mod_base = OTHER; note = 2'-O-methyluridine-3'-phosphate attached to N-[tris(N-acetylgalactosamine-alkyl)-amidodecanoyl)]-4-hydr oxyprolinol Hyp-(N-acetylgalactosamine-alkyl)3
ttagaacaccaaagattgtct

SEQ ID NO: 3721 - RNA, 21 nt, synthetic construct
  misc_feature 1..21: note = Description of Artificial Sequence: Synthetic oligonucleotide
  source 1..21: mol_type = other RNA
  modified_base 1: mod_base = OTHER; note = 2'-O-methyladenosine-3'- phosphorothioate
  modified_base 2: mod_base = OTHER; note = 2'-O-methyluridine-3'-phosphorothioate
  modified_base 3: mod_base = OTHER; note = 2'-O-methylcytidine-3'-phosphate
  modified_base 4: mod_base = OTHER; note = 2'-O-methyladenosine-3'-phosphate
  modified_base 5: mod_base = OTHER; note = 2'-O-methyluridine-3'-phosphate
  modified_base 6: mod_base = OTHER; note = 2'-O-methyluridine-3'-phosphate
  modified_base 7: mod_base = OTHER; note = 2'-fluorouridine-3'-phosphate
  modified_base 8: mod_base = OTHER; note = 2'-O-methylcytidine-3'-phosphate
  modified_base 9: mod_base = OTHER; note = 2'-fluoroadenosine-3'-phosphate
  modified_base 10: mod_base = OTHER; note = 2'-fluorocytidine-3'-phosphate
  modified_base 11: mod_base = OTHER; note = 2'-fluorouridine-3'-phosphate
  modified_base 12: mod_base = OTHER; note = 2'-O-methylguanosine-3'-phosphate
  modified_base 13: mod_base = OTHER; note = 2'-O-methyluridine-3'-phosphate
  modified_base 14: mod_base = OTHER; note = 2'-O-methylcytidine-3'-phosphate
  modified_base 15: mod_base = OTHER; note = 2'-O-methyluridine-3'-phosphate
  modified_base 16: mod_base = OTHER; note = 2'-O-methyladenosine-3'-phosphate
  modified_base 17: mod_base = OTHER; note = 2'-O-methylguanosine-3'-phosphate
  modified_base 18: mod_base = OTHER; note = 2'-O-methylguanosine-3'-phosphate
  modified_base 19: mod_base = OTHER; note = 2'-O-methylcytidine-3'-phosphate
  modified_base 20: mod_base = OTHER; note = 2'-O-methyluridine-3'-phosphate
  modified_base 21: mod_base = OTHER; note = 2'-O-methyladenosine-3'-phosphate attached to N-[tris(N-acetylgalactosamine-alkyl)-amidodecanoyl)]-4-hydr oxyprolinol Hyp-(N-acetylgalactosamine-alkyl)3
atcatttcactgtctaggcta

SEQ ID NO: 3722 - RNA, 21 nt, synthetic construct
  misc_feature 1..21: note = Description of Artificial Sequence: Synthetic oligonucleotide
  source 1..21: mol_type = other RNA
  modified_base 1: mod_base = OTHER; note = 2'-O-methyluridine-3'-phosphorothioate
  modified_base 2: mod_base = OTHER; note = 2'-O-methylcytidine-3'- phosphorothioate
  modified_base 3: mod_base = OTHER; note = 2'-O-methyladenosine-3'-phosphate
  modified_base 4: mod_base = OTHER; note = 2'-O-methylcytidine-3'-phosphate
  modified_base 5: mod_base = OTHER; note = 2'-O-methyluridine-3'-phosphate
  modified_base 6: mod_base = OTHER; note = 2'-O-methylguanosine-3'-phosphate
  modified_base 7: mod_base = OTHER; note = 2'-fluorouridine-3'-phosphate
  modified_base 8: mod_base = OTHER; note = 2'-O-methylcytidine-3'-phosphate
  modified_base 9: mod_base = OTHER; note = 2'-fluorouridine-3'-phosphate
  modified_base 10: mod_base = OTHER; note = 2'-fluoroadenosine-3'-phosphate
  modified_base 11: mod_base = OTHER; note = 2'-fluoroguanosine-3'-phosphate
  modified_base 12: mod_base = OTHER; note = 2'-O-methylguanosine-3'-phosphate
  modified_base 13: mod_base = OTHER; note = 2'-O-methylcytidine-3'-phosphate
  modified_base 14: mod_base = OTHER; note = 2'-O-methyluridine-3'-phosphate
  modified_base 15: mod_base = OTHER; note = 2'-O-methyladenosine-3'-phosphate
  modified_base 16: mod_base = OTHER; note = 2'-O-methylcytidine-3'-phosphate
  modified_base 17: mod_base = OTHER; note = 2'-O-methyladenosine-3'-phosphate
  modified_base 18: mod_base = OTHER; note = 2'-O-methyladenosine-3'-phosphate
  modified_base 19: mod_base = OTHER; note = 2'-O-methylcytidine-3'-phosphate
  modified_base 20: mod_base = OTHER; note = 2'-O-methyladenosine-3'-phosphate
  modified_base 21: mod_base = OTHER; note = 2'-O-methyladenosine-3'-phosphate attached to N-[tris(N-acetylgalactosamine-alkyl)-amidodecanoyl)]-4-hydr oxyprolinol Hyp-(N-acetylgalactosamine-alkyl)3
tcactgtctaggctacaacaa

SEQ ID NO: 3723 - RNA, 21 nt, synthetic construct
  misc_feature 1..21: note = Description of Artificial Sequence: Synthetic oligonucleotide
  source 1..21: mol_type = other RNA
  modified_base 1: mod_base = OTHER; note = 2'-O-methylcytidine-3'- phosphorothioate
  modified_base 2: mod_base = OTHER; note = 2'-O-methyladenosine-3'- phosphorothioate
  modified_base 3: mod_base = OTHER; note = 2'-O-methyladenosine-3'-phosphate
  modified_base 4: mod_base = OTHER; note = 2'-O-methylcytidine-3'-phosphate
  modified_base 5: mod_base = OTHER; note = 2'-O-methyluridine-3'-phosphate
  modified_base 6: mod_base = OTHER; note = 2'-O-methyladenosine-3'-phosphate
  modified_base 7: mod_base = OTHER; note = 2'-fluorouridine-3'-phosphate
  modified_base 8: mod_base = OTHER; note = 2'-O-methylcytidine-3'-phosphate
  modified_base 9: mod_base = OTHER; note = 2'-fluorocytidine-3'-phosphate
  modified_base 10: mod_base = OTHER; note = 2'-fluoroadenosine-3'-phosphate
  modified_base 11: mod_base = OTHER; note = 2'-fluoroadenosine-3'-phosphate
  modified_base 12: mod_base = OTHER; note = 2'-O-methylguanosine-3'-phosphate
  modified_base 13: mod_base = OTHER; note = 2'-O-methyluridine-3'-phosphate
  modified_base 14: mod_base = OTHER; note = 2'-O-methylguanosine-3'-phosphate
  modified_base 15: mod_base = OTHER; note = 2'-O-methyluridine-3'-phosphate
  modified_base 16: mod_base = OTHER; note = 2'-O-methyluridine-3'-phosphate
  modified_base 17: mod_base = OTHER; note = 2'-O-methyladenosine-3'-phosphate
  modified_base 18: mod_base = OTHER; note = 2'-O-methyluridine-3'-phosphate
  modified_base 19: mod_base = OTHER; note = 2'-O-methyladenosine-3'-phosphate
  modified_base 20: mod_base = OTHER; note = 2'-O-methylcytidine-3'-phosphate
  modified_base 21: mod_base = OTHER; note = 2'-O-methyladenosine-3'-phosphate attached to N-[tris(N-acetylgalactosamine-alkyl)-amidodecanoyl)]-4-hydr oxyprolinol Hyp-(N-acetylgalactosamine-alkyl)3
caactatccaagtgttataca

SEQ ID NO: 3724 - RNA, 21 nt, synthetic construct
  misc_feature 1..21: note = Description of Artificial Sequence: Synthetic oligonucleotide
  source 1..21: mol_type = other RNA
  modified_base 1: mod_base = OTHER; note = 2'-O-methyluridine-3'-phosphorothioate
  modified_base 2: mod_base = OTHER; note = 2'-O-methyluridine-3'-phosphorothioate
  modified_base 3: mod_base = OTHER; note = 2'-O-methylguanosine-3'-phosphate
  modified_base 4: mod_base = OTHER; note = 2'-O-methylguanosine-3'-phosphate
  modified_base 5: mod_base = OTHER; note = 2'-O-methyluridine-3'-phosphate
  modified_base 6: mod_base = OTHER; note = 2'-O-methyluridine-3'-phosphate
  modified_base 7: mod_base = OTHER; note = 2'-fluorocytidine-3'-phosphate
  modified_base 8: mod_base = OTHER; note = 2'-O-methylcytidine-3'-phosphate
  modified_base 9: mod_base = OTHER; note = 2'-fluoroadenosine-3'-phosphate
  modified_base 10: mod_base = OTHER; note = 2'-fluoroadenosine-3'-phosphate
  modified_base 11: mod_base = OTHER; note = 2'-fluoroguanosine-3'-phosphate
  modified_base 12: mod_base = OTHER; note = 2'-O-methyluridine-3'-phosphate
  modified_base 13: mod_base = OTHER; note = 2'-O-methylcytidine-3'-phosphate
  modified_base 14: mod_base = OTHER; note = 2'-O-methylcytidine-3'-phosphate
  modified_base 15: mod_base = OTHER; note = 2'-O-methyladenosine-3'-phosphate
  modified_base 16: mod_base = OTHER; note = 2'-O-methyladenosine-3'-phosphate
  modified_base 17: mod_base = OTHER; note = 2'-O-methyluridine-3'-phosphate
  modified_base 18: mod_base = OTHER; note = 2'-O-methyladenosine-3'-phosphate
  modified_base 19: mod_base = OTHER; note = 2'-O-methyluridine-3'-phosphate
  modified_base 20: mod_base = OTHER; note = 2'-O-methylguanosine-3'-phosphate
  modified_base 21: mod_base = OTHER; note = 2'-O-methyladenosine-3'-phosphate attached to N-[tris(N-acetylgalactosamine-alkyl)-amidodecanoyl)]-4-hydr oxyprolinol Hyp-(N-acetylgalactosamine-alkyl)3
ttggttccaagtccaatatga

SEQ ID NO: 3725 - RNA, 21 nt, synthetic construct
  misc_feature 1..21: note = Description of Artificial Sequence: Synthetic oligonucleotide
  source 1..21: mol_type = other RNA
  modified_base 1: mod_base = OTHER; note = 2'-O-methyluridine-3'-phosphorothioate
  modified_base 2: mod_base = OTHER; note = 2'-O-methylguanosine-3'- phosphorothioate
  modified_base 3: mod_base = OTHER; note = 2'-O-methylcytidine-3'-phosphate
  modified_base 4: mod_base = OTHER; note = 2'-O-methyluridine-3'-phosphate
  modified_base 5: mod_base = OTHER; note = 2'-O-methyluridine-3'-phosphate
  modified_base 6: mod_base = OTHER; note = 2'-O-methyladenosine-3'-phosphate
  modified_base 7: mod_base = OTHER; note = 2'-fluorouridine-3'-phosphate
  modified_base 8: mod_base = OTHER; note = 2'-O-methylguanosine-3'-phosphate
  modified_base 9: mod_base = OTHER; note = 2'-fluoroadenosine-3'-phosphate
  modified_base 10: mod_base = OTHER; note = 2'-fluoroguanosine-3'-phosphate
  modified_base 11: mod_base = OTHER; note = 2'-fluoroguanosine-3'-phosphate
  modified_base 12: mod_base = OTHER; note = 2'-O-methyluridine-3'-phosphate
  modified_base 13: mod_base = OTHER; note = 2'-O-methylguanosine-3'-phosphate
  modified_base 14: mod_base = OTHER; note = 2'-O-methyladenosine-3'-phosphate
  modified_base 15: mod_base = OTHER; note = 2'-O-methyluridine-3'-phosphate
  modified_base 16: mod_base = OTHER; note = 2'-O-methylcytidine-3'-phosphate
  modified_base 17: mod_base = OTHER; note = 2'-O-methyladenosine-3'-phosphate
  modified_base 18: mod_base = OTHER; note = 2'-O-methyladenosine-3'-phosphate
  modified_base 19: mod_base = OTHER; note = 2'-O-methyladenosine-3'-phosphate
  modified_base 20: mod_base = OTHER; note = 2'-O-methylcytidine-3'-phosphate
  modified_base 21: mod_base = OTHER; note = 2'-O-methyluridine-3'-phosphate attached to N-[tris(N-acetylgalactosamine-alkyl)-amidodecanoyl)]-4-hydr oxyprolinol Hyp-(N-acetylgalactosamine-alkyl)3
tgcttatgaggtgatcaaact

SEQ ID NO: 3726 - RNA, 21 nt, synthetic construct
  misc_feature 1..21: note = Description of Artificial Sequence: Synthetic oligonucleotide
  source 1..21: mol_type = other RNA
  modified_base 1: mod_base = OTHER; note = 2'-O-methyluridine-3'-phosphorothioate
  modified_base 2: mod_base = OTHER; note = 2'-O-methylcytidine-3'- phosphorothioate
  modified_base 3: mod_base = OTHER; note = 2'-O-methyluridine-3'-phosphate
  modified_base 4: mod_base = OTHER; note = 2'-O-methylcytidine-3'-phosphate
  modified_base 5: mod_base = OTHER; note = 2'-O-methyladenosine-3'-phosphate
  modified_base 6: mod_base = OTHER; note = 2'-O-methylguanosine-3'-phosphate
  modified_base 7: mod_base = OTHER; note = 2'-fluoroadenosine-3'-phosphate
  modified_base 8: mod_base = OTHER; note = 2'-O-methylcytidine-3'-phosphate
  modified_base 9: mod_base = OTHER; note = 2'-fluorocytidine-3'-phosphate
  modified_base 10: mod_base = OTHER; note = 2'-fluorouridine-3'-phosphate
  modified_base 11: mod_base = OTHER; note = 2'-fluorouridine-3'-phosphate
  modified_base 12: mod_base = OTHER; note = 2'-O-methylguanosine-3'-phosphate
  modified_base 13: mod_base = OTHER; note = 2'-O-methyluridine-3'-phosphate
  modified_base 14: mod_base = OTHER; note = 2'-O-methylguanosine-3'-phosphate
  modified_base 15: mod_base = OTHER; note = 2'-O-methyladenosine-3'-phosphate
  modified_base 16: mod_base = OTHER; note = 2'-O-methyladenosine-3'-phosphate
  modified_base 17: mod_base = OTHER; note = 2'-O-methylguanosine-3'-phosphate
  modified_base 18: mod_base = OTHER; note = 2'-O-methylguanosine-3'-phosphate
  modified_base 19: mod_base = OTHER; note = 2'-O-methyluridine-3'-phosphate
  modified_base 20: mod_base = OTHER; note = 2'-O-methylguanosine-3'-phosphate
  modified_base 21: mod_base = OTHER; note = 2'-O-methyladenosine-3'-phosphate attached to N-[tris(N-acetylgalactosamine-alkyl)-amidodecanoyl)]-4-hydr oxyprolinol Hyp-(N-acetylgalactosamine-alkyl)3
tctcagaccttgtgaaggtga

SEQ ID NO: 3727 - RNA, 21 nt, synthetic construct
  misc_feature 1..21: note = Description of Artificial Sequence: Synthetic oligonucleotide
  source 1..21: mol_type = other RNA
  modified_base 1: mod_base = OTHER; note = 2'-O-methyluridine-3'-phosphorothioate
  modified_base 2: mod_base = OTHER; note = 2'-O-methyladenosine-3'- phosphorothioate
  modified_base 3: mod_base = OTHER; note = 2'-O-methyladenosine-3'-phosphate
  modified_base 4: mod_base = OTHER; note = 2'-O-methyladenosine-3'-phosphate
  modified_base 5: mod_base = OTHER; note = 2'-O-methyladenosine-3'-phosphate
  modified_base 6: mod_base = OTHER; note = 2'-O-methyluridine-3'-phosphate
  modified_base 7: mod_base = OTHER; note = 2'-fluorocytidine-3'-phosphate
  modified_base 8: mod_base = OTHER; note = 2'-O-methylcytidine-3'-phosphate
  modified_base 9: mod_base = OTHER; note = 2'-fluoroadenosine-3'-phosphate
  modified_base 10: mod_base = OTHER; note = 2'-fluorocytidine-3'-phosphate
  modified_base 11: mod_base = OTHER; note = 2'-fluoroadenosine-3'-phosphate
  modified_base 12: mod_base = OTHER; note = 2'-O-methylguanosine-3'-phosphate
  modified_base 13: mod_base = OTHER; note = 2'-O-methylcytidine-3'-phosphate
  modified_base 14: mod_base = OTHER; note = 2'-O-methyluridine-3'-phosphate
  modified_base 15: mod_base = OTHER; note = 2'-O-methyladenosine-3'-phosphate
  modified_base 16: mod_base = OTHER; note = 2'-O-methyluridine-3'-phosphate
  modified_base 17: mod_base = OTHER; note = 2'-O-methyladenosine-3'-phosphate
  modified_base 18: mod_base = OTHER; note = 2'-O-methyluridine-3'-phosphate
  modified_base 19: mod_base = OTHER; note = 2'-O-methylcytidine-3'-phosphate
  modified_base 20: mod_base = OTHER; note = 2'-O-methylcytidine-3'-phosphate
  modified_base 21: mod_base = OTHER; note = 2'-O-methyluridine-3'-phosphate attached to N-[tris(N-acetylgalactosamine-alkyl)-amidodecanoyl)]-4-hydr oxyprolinol Hyp-(N-acetylgalactosamine-alkyl)3
taaaatccacagctatatcct

SEQ ID NO: 3728 - RNA, 21 nt, synthetic construct
  misc_feature 1..21: note = Description of Artificial Sequence: Synthetic oligonucleotide
  source 1..21: mol_type = other RNA
  modified_base 1: mod_base = OTHER; note = 2'-O-methylcytidine-3'- phosphorothioate
  modified_base 2: mod_base = OTHER; note = 2'-O-methylcytidine-3'- phosphorothioate
  modified_base 3: mod_base = OTHER; note = 2'-O-methyluridine-3'-phosphate
  modified_base 4: mod_base = OTHER; note = 2'-O-methyluridine-3'-phosphate
  modified_base 5: mod_base = OTHER; note = 2'-O-methylcytidine-3'-phosphate
  modified_base 6: mod_base = OTHER; note = 2'-O-methyladenosine-3'-phosphate
  modified_base 7: mod_base = OTHER; note = 2'-fluorocytidine-3'-phosphate
  modified_base 8: mod_base = OTHER; note = 2'-O-methyluridine-3'-phosphate
  modified_base 9: mod_base = OTHER; note = 2'-fluoroguanosine-3'-phosphate
  modified_base 10: mod_base = OTHER; note = 2'-fluoroadenosine-3'-phosphate
  modified_base 11: mod_base = OTHER; note = 2'-fluoroadenosine-3'-phosphate
  modified_base 12: mod_base = OTHER; note = 2'-O-methylcytidine-3'-phosphate
  modified_base 13: mod_base = OTHER; note = 2'-O-methyladenosine-3'-phosphate
  modified_base 14: mod_base = OTHER; note = 2'-O-methyluridine-3'-phosphate
  modified_base 15: mod_base = OTHER; note = 2'-O-methylguanosine-3'-phosphate
  modified_base 16: mod_base = OTHER; note = 2'-O-methylcytidine-3'-phosphate
  modified_base 17: mod_base = OTHER; note = 2'-O-methylcytidine-3'-phosphate
  modified_base 18: mod_base = OTHER; note = 2'-O-methyluridine-3'-phosphate
  modified_base 19: mod_base = OTHER; note = 2'-O-methyladenosine-3'-phosphate
  modified_base 20: mod_base = OTHER; note = 2'-O-methylguanosine-3'-phosphate
  modified_base 21: mod_base = OTHER; note = 2'-O-methyluridine-3'-phosphate attached to N-[tris(N-acetylgalactosamine-alkyl)-amidodecanoyl)]-4-hydr oxyprolinol Hyp-(N-acetylgalactosamine-alkyl)3
ccttcactgaacatgcctagt

SEQ ID NO: 3729 - RNA, 21 nt, synthetic construct
  misc_feature 1..21: note = Description of Artificial Sequence: Synthetic oligonucleotide
  source 1..21: mol_type = other RNA
  modified_base 1: mod_base = OTHER; note = 2'-O-methylguanosine-3'- phosphorothioate
  modified_base 2: mod_base = OTHER; note = 2'-O-methylguanosine-3'- phosphorothioate
  modified_base 3: mod_base = OTHER; note = 2'-O-methylguanosine-3'-phosphate
  modified_base 4: mod_base = OTHER; note = 2'-O-methyladenosine-3'-phosphate
  modified_base 5: mod_base = OTHER; note = 2'-O-methyluridine-3'-phosphate
  modified_base 6: mod_base = OTHER; note = 2'-O-methylcytidine-3'-phosphate
  modified_base 7: mod_base = OTHER; note = 2'-fluorocytidine-3'-phosphate
  modified_base 8: mod_base = OTHER; note = 2'-O-methyladenosine-3'-phosphate
  modified_base 9: mod_base = OTHER; note = 2'-fluoroguanosine-3'-phosphate
  modified_base 10: mod_base = OTHER; note = 2'-fluorouridine-3'-phosphate
  modified_base 11: mod_base = OTHER; note = 2'-fluoroguanosine-3'-phosphate
  modified_base 12: mod_base = OTHER; note = 2'-O-methyluridine-3'-phosphate
  modified_base 13: mod_base = OTHER; note = 2'-O-methyladenosine-3'-phosphate
  modified_base 14: mod_base = OTHER; note = 2'-O-methyluridine-3'-phosphate
  modified_base 15: mod_base = OTHER; note = 2'-O-methyladenosine-3'-phosphate
  modified_base 16: mod_base = OTHER; note = 2'-O-methyladenosine-3'-phosphate
  modified_base 17: mod_base = OTHER; note = 2'-O-methyladenosine-3'-phosphate
  modified_base 18: mod_base = OTHER; note = 2'-O-methyluridine-3'-phosphate
  modified_base 19: mod_base = OTHER; note = 2'-O-methylcytidine-3'-phosphate
  modified_base 20: mod_base = OTHER; note = 2'-O-methylcytidine-3'-phosphate
  modified_base 21: mod_base = OTHER; note = 2'-O-methyladenosine-3'-phosphate attached to N-[tris(N-acetylgalactosamine-alkyl)-amidodecanoyl)]-4-hydr oxyprolinol Hyp-(N-acetylgalactosamine-alkyl)3
gggatccagtgtataaatcca

SEQ ID NO: 3730 - RNA, 21 nt, synthetic construct
  misc_feature 1..21: note = Description of Artificial Sequence: Synthetic oligonucleotide
  source 1..21: mol_type = other RNA
  modified_base 1: mod_base = OTHER; note = 2'-O-methylcytidine-3'- phosphorothioate
  modified_base 2: mod_base = OTHER; note = 2'-O-methyladenosine-3'- phosphorothioate
  modified_base 3: mod_base = OTHER; note = 2'-O-methyladenosine-3'-phosphate
  modified_base 4: mod_base = OTHER; note = 2'-O-methyluridine-3'-phosphate
  modified_base 5: mod_base = OTHER; note = 2'-O-methyladenosine-3'-phosphate
  modified_base 6: mod_base = OTHER; note = 2'-O-methyladenosine-3'-phosphate
  modified_base 7: mod_base = OTHER; note = 2'-fluoroadenosine-3'-phosphate
  modified_base 8: mod_base = OTHER; note = 2'-O-methylcytidine-3'-phosphate
  modified_base 9: mod_base = OTHER; note = 2'-fluorocytidine-3'-phosphate
  modified_base 10: mod_base = OTHER; note = 2'-fluorouridine-3'-phosphate
  modified_base 11: mod_base = OTHER; note = 2'-fluorouridine-3'-phosphate
  modified_base 12: mod_base = OTHER; note = 2'-O-methylguanosine-3'-phosphate
  modified_base 13: mod_base = OTHER; note = 2'-O-methyladenosine-3'-phosphate
  modified_base 14: mod_base = OTHER; note = 2'-O-methyladenosine-3'-phosphate
  modified_base 15: mod_base = OTHER; note = 2'-O-methylcytidine-3'-phosphate
  modified_base 16: mod_base = OTHER; note = 2'-O-methyladenosine-3'-phosphate
  modified_base 17: mod_base = OTHER; note = 2'-O-methylguanosine-3'-phosphate
  modified_base 18: mod_base = OTHER; note = 2'-O-methyluridine-3'-phosphate
  modified_base 19: mod_base = OTHER; note = 2'-O-methylguanosine-3'-phosphate
  modified_base 20: mod_base = OTHER; note = 2'-O-methyladenosine-3'-phosphate
  modified_base 21: mod_base = OTHER; note = 2'-O-methyladenosine-3'-phosphate attached to N-[tris(N-acetylgalactosamine-alkyl)-amidodecanoyl)]-4-hydr oxyprolinol Hyp-(N-acetylgalactosamine-alkyl)3
caataaaccttgaacagtgaa

SEQ ID NO: 3731 - RNA, 21 nt, synthetic construct
  misc_feature 1..21: note = Description of Artificial Sequence: Synthetic oligonucleotide
  source 1..21: mol_type = other RNA
  modified_base 1: mod_base = OTHER; note = 2'-O-methylguanosine-3'- phosphorothioate
  modified_base 2: mod_base = OTHER; note = 2'-O-methylguanosine-3'- phosphorothioate
  modified_base 3: mod_base = OTHER; note = 2'-O-methylcytidine-3'-phosphate
  modified_base 4: mod_base = OTHER; note = 2'-O-methylcytidine-3'-phosphate
  modified_base 5: mod_base = OTHER; note = 2'-O-methyluridine-3'-phosphate
  modified_base 6: mod_base = OTHER; note = 2'-O-methylguanosine-3'-phosphate
  modified_base 7: mod_base = OTHER; note = 2'-fluorouridine-3'-phosphate
  modified_base 8: mod_base = OTHER; note = 2'-O-methylguanosine-3'-phosphate
  modified_base 9: mod_base = OTHER; note = 2'-fluorocytidine-3'-phosphate
  modified_base 10: mod_base = OTHER; note = 2'-fluorocytidine-3'-phosphate
  modified_base 11: mod_base = OTHER; note = 2'-fluoroadenosine-3'-phosphate
  modified_base 12: mod_base = OTHER; note = 2'-O-methyluridine-3'-phosphate
  modified_base 13: mod_base = OTHER; note = 2'-O-methylcytidine-3'-phosphate
  modified_base 14: mod_base = OTHER; note = 2'-O-methyladenosine-3'-phosphate
  modified_base 15: mod_base = OTHER; note = 2'-O-methylguanosine-3'-phosphate
  modified_base 16: mod_base = OTHER; note = 2'-O-methyluridine-3'-phosphate
  modified_base 17: mod_base = OTHER; note = 2'-O-methyladenosine-3'-phosphate
  modified_base 18: mod_base = OTHER; note = 2'-O-methyluridine-3'-phosphate
  modified_base 19: mod_base = OTHER; note = 2'-O-methylcytidine-3'-phosphate
  modified_base 20: mod_base = OTHER; note = 2'-O-methyluridine-3'-phosphate
  modified_base 21: mod_base = OTHER; note = 2'-O-methyluridine-3'-phosphate attached to N-[tris(N-acetylgalactosamine-alkyl)-amidodecanoyl)]-4-hydr oxyprolinol Hyp-(N-acetylgalactosamine-alkyl)3
ggcctgtgccatcagtatctt

SEQ ID NO: 3732 - RNA, 21 nt, synthetic construct
  misc_feature 1..21: note = Description of Artificial Sequence: Synthetic oligonucleotide
  source 1..21: mol_type = other RNA
  modified_base 1: mod_base = OTHER; note = 2'-O-methyluridine-3'-phosphorothioate
  modified_base 2: mod_base = OTHER; note = 2'-O-methyluridine-3'-phosphorothioate
  modified_base 3: mod_base = OTHER; note = 2'-O-methylguanosine-3'-phosphate
  modified_base 4: mod_base = OTHER; note = 2'-O-methyluridine-3'-phosphate
  modified_base 5: mod_base = OTHER; note = 2'-O-methyluridine-3'-phosphate
  modified_base 6: mod_base = OTHER; note = 2'-O-methylguanosine-3'-phosphate
  modified_base 7: mod_base = OTHER; note = 2'-fluoroadenosine-3'-phosphate
  modified_base 8: mod_base = OTHER; note = 2'-O-methyluridine-3'-phosphate
  modified_base 9: mod_base = OTHER; note = 2'-fluoroguanosine-3'-phosphate
  modified_base 10: mod_base = OTHER; note = 2'-fluorouridine-3'-phosphate
  modified_base 11: mod_base = OTHER; note = 2'-fluorocytidine-3'-phosphate
  modified_base 12: mod_base = OTHER; note = 2'-O-methyladenosine-3'-phosphate
  modified_base 13: mod_base = OTHER; note = 2'-O-methyluridine-3'-phosphate
  modified_base 14: mod_base = OTHER; note = 2'-O-methylcytidine-3'-phosphate
  modified_base 15: mod_base = OTHER; note = 2'-O-methylguanosine-3'-phosphate
  modified_base 16: mod_base = OTHER; note = 2'-O-methyladenosine-3'-phosphate
  modified_base 17: mod_base = OTHER; note = 2'-O-methyladenosine-3'-phosphate
  modified_base 18: mod_base = OTHER; note = 2'-O-methylguanosine-3'-phosphate
  modified_base 19: mod_base = OTHER; note = 2'-O-methyladenosine-3'-phosphate
  modified_base 20: mod_base = OTHER; note = 2'-O-methylcytidine-3'-phosphate
  modified_base 21: mod_base = OTHER; note = 2'-O-methyladenosine-3'-phosphate attached to N-[tris(N-acetylgalactosamine-alkyl)-amidodecanoyl)]-4-hydr oxyprolinol Hyp-(N-acetylgalactosamine-alkyl)3
ttgttgatgtcatcgaagaca

SEQ ID NO: 3733 - RNA, 21 nt, synthetic construct
  misc_feature 1..21: note = Description of Artificial Sequence: Synthetic oligonucleotide
  source 1..21: mol_type = other RNA
  modified_base 1: mod_base = OTHER; note = 2'-O-methyladenosine-3'- phosphorothioate
  modified_base 2: mod_base = OTHER; note = 2'-O-methylguanosine-3'- phosphorothioate
  modified_base 3: mod_base = OTHER; note = 2'-O-methyladenosine-3'-phosphate
  modified_base 4: mod_base = OTHER; note = 2'-O-methyluridine-3'-phosphate
  modified_base 5: mod_base = OTHER; note = 2'-O-methyluridine-3'-phosphate
  modified_base 6: mod_base = OTHER; note = 2'-O-methyluridine-3'-phosphate
  modified_base 7: mod_base = OTHER; note = 2'-fluoroguanosine-3'-phosphate
  modified_base 8: mod_base = OTHER; note = 2'-O-methylguanosine-3'-phosphate
  modified_base 9: mod_base = OTHER; note = 2'-fluorocytidine-3'-phosphate
  modified_base 10: mod_base = OTHER; note = 2'-fluoroadenosine-3'-phosphate
  modified_base 11: mod_base = OTHER; note = 2'-fluoroguanosine-3'-phosphate
  modified_base 12: mod_base = OTHER; note = 2'-O-methyladenosine-3'-phosphate
  modified_base 13: mod_base = OTHER; note = 2'-O-methylguanosine-3'-phosphate
  modified_base 14: mod_base = OTHER; note = 2'-O-methyladenosine-3'-phosphate
  modified_base 15: mod_base = OTHER; note = 2'-O-methylguanosine-3'-phosphate
  modified_base 16: mod_base = OTHER; note = 2'-O-methyluridine-3'-phosphate
  modified_base 17: mod_base = OTHER; note = 2'-O-methyladenosine-3'-phosphate
  modified_base 18: mod_base = OTHER; note = 2'-O-methyluridine-3'-phosphate
  modified_base 19: mod_base = OTHER; note = 2'-O-methyladenosine-3'-phosphate
  modified_base 20: mod_base = OTHER; note = 2'-O-methyladenosine-3'-phosphate
  modified_base 21: mod_base = OTHER; note = 2'-O-methyluridine-3'-phosphate attached to N-[tris(N-acetylgalactosamine-alkyl)-amidodecanoyl)]-4-hydr oxyprolinol Hyp-(N-acetylgalactosamine-alkyl)3
agatttggcagagagtataat

SEQ ID NO: 3734 - RNA, 21 nt, synthetic construct
  misc_feature 1..21: note = Description of Artificial Sequence: Synthetic oligonucleotide
  source 1..21: mol_type = other RNA
  modified_base 1: mod_base = OTHER; note = 2'-O-methyluridine-3'-phosphorothioate
  modified_base 2: mod_base = OTHER; note = 2'-O-methyluridine-3'-phosphorothioate
  modified_base 3: mod_base = OTHER; note = 2'-O-methyluridine-3'-phosphate
  modified_base 4: mod_base = OTHER; note = 2'-O-methylcytidine-3'-phosphate
  modified_base 5: mod_base = OTHER; note = 2'-O-methylcytidine-3'-phosphate
  modified_base 6: mod_base = OTHER; note = 2'-O-methyladenosine-3'-phosphate
  modified_base 7: mod_base = OTHER; note = 2'-fluorocytidine-3'-phosphate
  modified_base 8: mod_base = OTHER; note = 2'-O-methylcytidine-3'-phosphate
  modified_base 9: mod_base = OTHER; note = 2'-fluoroadenosine-3'-phosphate
  modified_base 10: mod_base = OTHER; note = 2'-fluorouridine-3'-phosphate
  modified_base 11: mod_base = OTHER; note = 2'-fluoroguanosine-3'-phosphate
  modified_base 12: mod_base = OTHER; note = 2'-O-methyladenosine-3'-phosphate
  modified_base 13: mod_base = OTHER; note = 2'-O-methyluridine-3'-phosphate
  modified_base 14: mod_base = OTHER; note = 2'-O-methyluridine-3'-phosphate
  modified_base 15: mod_base = OTHER; note = 2'-O-methyladenosine-3'-phosphate
  modified_base 16: mod_base = OTHER; note = 2'-O-methyladenosine-3'-phosphate
  modified_base 17: mod_base = OTHER; note = 2'-O-methylguanosine-3'-phosphate
  modified_base 18: mod_base = OTHER; note = 2'-O-methylguanosine-3'-phosphate
  modified_base 19: mod_base = OTHER; note = 2'-O-methylguanosine-3'-phosphate
  modified_base 20: mod_base = OTHER; note = 2'-O-methyluridine-3'-phosphate
  modified_base 21: mod_base = OTHER; note = 2'-O-methyladenosine-3'-phosphate attached to N-[tris(N-acetylgalactosamine-alkyl)-amidodecanoyl)]-4-hydr oxyprolinol Hyp-(N-acetylgalactosamine-alkyl)3
tttccaccatgattaagggta

SEQ ID NO: 3735 - RNA, 21 nt, synthetic construct
  misc_feature 1..21: note = Description of Artificial Sequence: Synthetic oligonucleotide
  source 1..21: mol_type = other RNA
  modified_base 1: mod_base = OTHER; note = 2'-O-methylcytidine-3'- phosphorothioate
  modified_base 2: mod_base = OTHER; note = 2'-O-methyluridine-3'-phosphorothioate
  modified_base 3: mod_base = OTHER; note = 2'-O-methyladenosine-3'-phosphate
  modified_base 4: mod_base = OTHER; note = 2'-O-methylguanosine-3'-phosphate
  modified_base 5: mod_base = OTHER; note = 2'-O-methylguanosine-3'-phosphate
  modified_base 6: mod_base = OTHER; note = 2'-O-methylcytidine-3'-phosphate
  modified_base 7: mod_base = OTHER; note = 2'-fluorouridine-3'-phosphate
  modified_base 8: mod_base = OTHER; note = 2'-O-methyladenosine-3'-phosphate
  modified_base 9: mod_base = OTHER; note = 2'-fluorocytidine-3'-phosphate
  modified_base 10: mod_base = OTHER; note = 2'-fluoroadenosine-3'-phosphate
  modified_base 11: mod_base = OTHER; note = 2'-fluoroadenosine-3'-phosphate
  modified_base 12: mod_base = OTHER; note = 2'-O-methylcytidine-3'-phosphate
  modified_base 13: mod_base = OTHER; note = 2'-O-methyladenosine-3'-phosphate
  modified_base 14: mod_base = OTHER; note = 2'-O-methylguanosine-3'-phosphate
  modified_base 15: mod_base = OTHER; note = 2'-O-methylguanosine-3'-phosphate
  modified_base 16: mod_base = OTHER; note = 2'-O-methyladenosine-3'-phosphate
  modified_base 17: mod_base = OTHER; note = 2'-O-methyluridine-3'-phosphate
  modified_base 18: mod_base = OTHER; note = 2'-O-methyluridine-3'-phosphate
  modified_base 19: mod_base = OTHER; note = 2'-O-methylcytidine-3'-phosphate
  modified_base 20: mod_base = OTHER; note = 2'-O-methyluridine-3'-phosphate
  modified_base 21: mod_base = OTHER; note = 2'-O-methyladenosine-3'-phosphate attached to N-[tris(N-acetylgalactosamine-alkyl)-amidodecanoyl)]-4-hydr oxyprolinol Hyp-(N-acetylgalactosamine-alkyl)3
ctaggctacaacaggattcta

SEQ ID NO: 3736 - RNA, 21 nt, synthetic construct
  misc_feature 1..21: note = Description of Artificial Sequence: Synthetic oligonucleotide
  source 1..21: mol_type = other RNA
  modified_base 1: mod_base = OTHER; note = 2'-O-methyluridine-3'-phosphorothioate
  modified_base 2: mod_base = OTHER; note = 2'-O-methylguanosine-3'- phosphorothioate
  modified_base 3: mod_base = OTHER; note = 2'-O-methylguanosine-3'-phosphate
  modified_base 4: mod_base = OTHER; note = 2'-O-methyladenosine-3'-phosphate
  modified_base 5: mod_base = OTHER; note = 2'-O-methylguanosine-3'-phosphate
  modified_base 6: mod_base = OTHER; note = 2'-O-methylguanosine-3'-phosphate
  modified_base 7: mod_base = OTHER; note = 2'-fluorouridine-3'-phosphate
  modified_base 8: mod_base = OTHER; note = 2'-O-methyluridine-3'-phosphate
  modified_base 9: mod_base = OTHER; note = 2'-fluoroguanosine-3'-phosphate
  modified_base 10: mod_base = OTHER; note = 2'-fluorouridine-3'-phosphate
  modified_base 11: mod_base = OTHER; note = 2'-fluoroguanosine-3'-phosphate
  modified_base 12: mod_base = OTHER; note = 2'-O-methylcytidine-3'-phosphate
  modified_base 13: mod_base = OTHER; note = 2'-O-methyladenosine-3'-phosphate
  modified_base 14: mod_base = OTHER; note = 2'-O-methyluridine-3'-phosphate
  modified_base 15: mod_base = OTHER; note = 2'-O-methylguanosine-3'-phosphate
  modified_base 16: mod_base = OTHER; note = 2'-O-methyluridine-3'-phosphate
  modified_base 17: mod_base = OTHER; note = 2'-O-methyluridine-3'-phosphate
  modified_base 18: mod_base = OTHER; note = 2'-O-methylguanosine-3'-phosphate
  modified_base 19: mod_base = OTHER; note = 2'-O-methyluridine-3'-phosphate
  modified_base 20: mod_base = OTHER; note = 2'-O-methylcytidine-3'-phosphate
  modified_base 21: mod_base = OTHER; note = 2'-O-methyladenosine-3'-phosphate attached to N-[tris(N-acetylgalactosamine-alkyl)-amidodecanoyl)]-4-hydr oxyprolinol Hyp-(N-acetylgalactosamine-alkyl)3
tggaggttgtgcatgttgtca

SEQ ID NO: 3737 - RNA, 21 nt, synthetic construct
  misc_feature 1..21: note = Description of Artificial Sequence: Synthetic oligonucleotide
  source 1..21: mol_type = other RNA
  modified_base 1: mod_base = OTHER; note = 2'-O-methylguanosine-3'- phosphorothioate
  modified_base 2: mod_base = OTHER; note = 2'-O-methylcytidine-3'- phosphorothioate
  modified_base 3: mod_base = OTHER; note = 2'-O-methyluridine-3'-phosphate
  modified_base 4: mod_base = OTHER; note = 2'-O-methylcytidine-3'-phosphate
  modified_base 5: mod_base = OTHER; note = 2'-O-methylcytidine-3'-phosphate
  modified_base 6: mod_base = OTHER; note = 2'-O-methyluridine-3'-phosphate
  modified_base 7: mod_base = OTHER; note = 2'-fluorouridine-3'-phosphate
  modified_base 8: mod_base = OTHER; note = 2'-O-methylcytidine-3'-phosphate
  modified_base 9: mod_base = OTHER; note = 2'-fluoroadenosine-3'-phosphate
  modified_base 10: mod_base = OTHER; note = 2'-fluorocytidine-3'-phosphate
  modified_base 11: mod_base = OTHER; note = 2'-fluorouridine-3'-phosphate
  modified_base 12: mod_base = OTHER; note = 2'-O-methylguanosine-3'-phosphate
  modified_base 13: mod_base = OTHER; note = 2'-O-methyladenosine-3'-phosphate
  modified_base 14: mod_base = OTHER; note = 2'-O-methyladenosine-3'-phosphate
  modified_base 15: mod_base = OTHER; note = 2'-O-methylcytidine-3'-phosphate
  modified_base 16: mod_base = OTHER; note = 2'-O-methyladenosine-3'-phosphate
  modified_base 17: mod_base = OTHER; note = 2'-O-methyluridine-3'-phosphate
  modified_base 18: mod_base = OTHER; note = 2'-O-methylguanosine-3'-phosphate
  modified_base 19: mod_base = OTHER; note = 2'-O-methylcytidine-3'-phosphate
  modified_base 20: mod_base = OTHER; note = 2'-O-methylcytidine-3'-phosphate
  modified_base 21: mod_base = OTHER; note = 2'-O-methyluridine-3'-phosphate attached to N-[tris(N-acetylgalactosamine-alkyl)-amidodecanoyl)]-4-hydr oxyprolinol Hyp-(N-acetylgalactosamine-alkyl)3
gctccttcactgaacatgcct

SEQ ID NO: 3738 - RNA, 21 nt, synthetic construct
  misc_feature 1..21: note = Description of Artificial Sequence: Synthetic oligonucleotide
  source 1..21: mol_type = other RNA
  modified_base 1: mod_base = OTHER; note = 2'-O-methylcytidine-3'- phosphorothioate
  modified_base 2: mod_base = OTHER; note = 2'-O-methyluridine-3'-phosphorothioate
  modified_base 3: mod_base = OTHER; note = 2'-O-methyluridine-3'-phosphate
  modified_base 4: mod_base = OTHER; note = 2'-O-methyluridine-3'-phosphate
  modified_base 5: mod_base = OTHER; note = 2'-O-methyluridine-3'-phosphate
  modified_base 6: mod_base = OTHER; note = 2'-O-methylguanosine-3'-phosphate
  modified_base 7: mod_base = OTHER; note = 2'-fluoroguanosine-3'-phosphate
  modified_base 8: mod_base = OTHER; note = 2'-O-methyluridine-3'-phosphate
  modified_base 9: mod_base = OTHER; note = 2'-fluorouridine-3'-phosphate
  modified_base 10: mod_base = OTHER; note = 2'-fluorocytidine-3'-phosphate
  modified_base 11: mod_base = OTHER; note = 2'-fluorocytidine-3'-phosphate
  modified_base 12: mod_base = OTHER; note = 2'-O-methyladenosine-3'-phosphate
  modified_base 13: mod_base = OTHER; note = 2'-O-methyladenosine-3'-phosphate
  modified_base 14: mod_base = OTHER; note = 2'-O-methylguanosine-3'-phosphate
  modified_base 15: mod_base = OTHER; note = 2'-O-methyluridine-3'-phosphate
  modified_base 16: mod_base = OTHER; note = 2'-O-methylcytidine-3'-phosphate
  modified_base 17: mod_base = OTHER; note = 2'-O-methylcytidine-3'-phosphate
  modified_base 18: mod_base = OTHER; note = 2'-O-methyladenosine-3'-phosphate
  modified_base 19: mod_base = OTHER; note = 2'-O-methyladenosine-3'-phosphate
  modified_base 20: mod_base = OTHER; note = 2'-O-methyluridine-3'-phosphate
  modified_base 21: mod_base = OTHER; note = 2'-O-methyladenosine-3'-phosphate attached to N-[tris(N-acetylgalactosamine-alkyl)-amidodecanoyl)]-4-hydr oxyprolinol Hyp-(N-acetylgalactosamine-alkyl)3
cttttggttccaagtccaata

SEQ ID NO: 3739 - RNA, 21 nt, synthetic construct
  misc_feature 1..21: note = Description of Artificial Sequence: Synthetic oligonucleotide
  source 1..21: mol_type = other RNA
  modified_base 1: mod_base = OTHER; note = 2'-O-methylguanosine-3'- phosphorothioate
  modified_base 2: mod_base = OTHER; note = 2'-O-methylcytidine-3'- phosphorothioate
  modified_base 3: mod_base = OTHER; note = 2'-O-methylcytidine-3'-phosphate
  modified_base 4: mod_base = OTHER; note = 2'-O-methyluridine-3'-phosphate
  modified_base 5: mod_base = OTHER; note = 2'-O-methylguanosine-3'-phosphate
  modified_base 6: mod_base = OTHER; note = 2'-O-methyluridine-3'-phosphate
  modified_base 7: mod_base = OTHER; note = 2'-fluoroguanosine-3'-phosphate
  modified_base 8: mod_base = OTHER; note = 2'-O-methylcytidine-3'-phosphate
  modified_base 9: mod_base = OTHER; note = 2'-fluorocytidine-3'-phosphate
  modified_base 10: mod_base = OTHER; note = 2'-fluoroadenosine-3'-phosphate
  modified_base 11: mod_base = OTHER; note = 2'-fluorouridine-3'-phosphate
  modified_base 12: mod_base = OTHER; note = 2'-O-methylcytidine-3'-phosphate
  modified_base 13: mod_base = OTHER; note = 2'-O-methyladenosine-3'-phosphate
  modified_base 14: mod_base = OTHER; note = 2'-O-methylguanosine-3'-phosphate
  modified_base 15: mod_base = OTHER; note = 2'-O-methyluridine-3'-phosphate
  modified_base 16: mod_base = OTHER; note = 2'-O-methyladenosine-3'-phosphate
  modified_base 17: mod_base = OTHER; note = 2'-O-methyluridine-3'-phosphate
  modified_base 18: mod_base = OTHER; note = 2'-O-methylcytidine-3'-phosphate
  modified_base 19: mod_base = OTHER; note = 2'-O-methyluridine-3'-phosphate
  modified_base 20: mod_base = OTHER; note = 2'-O-methyluridine-3'-phosphate
  modified_base 21: mod_base = OTHER; note = 2'-O-methyladenosine-3'-phosphate attached to N-[tris(N-acetylgalactosamine-alkyl)-amidodecanoyl)]-4-hydr oxyprolinol Hyp-(N-acetylgalactosamine-alkyl)3
gcctgtgccatcagtatctta

SEQ ID NO: 3740 - RNA, 21 nt, synthetic construct
  misc_feature 1..21: note = Description of Artificial Sequence: Synthetic oligonucleotide
  source 1..21: mol_type = other RNA
  modified_base 1: mod_base = OTHER; note = 2'-O-methylguanosine-3'- phosphorothioate
  modified_base 2: mod_base = OTHER; note = 2'-O-methylcytidine-3'- phosphorothioate
  modified_base 3: mod_base = OTHER; note = 2'-O-methyluridine-3'-phosphate
  modified_base 4: mod_base = OTHER; note = 2'-O-methyluridine-3'-phosphate
  modified_base 5: mod_base = OTHER; note = 2'-O-methyladenosine-3'-phosphate
  modified_base 6: mod_base = OTHER; note = 2'-O-methyluridine-3'-phosphate
  modified_base 7: mod_base = OTHER; note = 2'-fluoroguanosine-3'-phosphate
  modified_base 8: mod_base = OTHER; note = 2'-O-methyladenosine-3'-phosphate
  modified_base 9: mod_base = OTHER; note = 2'-fluoroguanosine-3'-phosphate
  modified_base 10: mod_base = OTHER; note = 2'-fluoroguanosine-3'-phosphate
  modified_base 11: mod_base = OTHER; note = 2'-fluorouridine-3'-phosphate
  modified_base 12: mod_base = OTHER; note = 2'-O-methylguanosine-3'-phosphate
  modified_base 13: mod_base = OTHER; note = 2'-O-methyladenosine-3'-phosphate
  modified_base 14: mod_base = OTHER; note = 2'-O-methyluridine-3'-phosphate
  modified_base 15: mod_base = OTHER; note = 2'-O-methylcytidine-3'-phosphate
  modified_base 16: mod_base = OTHER; note = 2'-O-methyladenosine-3'-phosphate
  modified_base 17: mod_base = OTHER; note = 2'-O-methyladenosine-3'-phosphate
  modified_base 18: mod_base = OTHER; note = 2'-O-methyladenosine-3'-phosphate
  modified_base 19: mod_base = OTHER; note = 2'-O-methylcytidine-3'-phosphate
  modified_base 20: mod_base = OTHER; note = 2'-O-methyluridine-3'-phosphate
  modified_base 21: mod_base = OTHER; note = 2'-O-methyladenosine-3'-phosphate attached to N-[tris(N-acetylgalactosamine-alkyl)-amidodecanoyl)]-4-hydr oxyprolinol Hyp-(N-acetylgalactosamine-alkyl)3
gcttatgaggtgatcaaacta

SEQ ID NO: 3741 - RNA, 21 nt, synthetic construct
  misc_feature 1..21: note = Description of Artificial Sequence: Synthetic oligonucleotide
  source 1..21: mol_type = other RNA
  modified_base 1: mod_base = OTHER; note = 2'-O-methylcytidine-3'- phosphorothioate
  modified_base 2: mod_base = OTHER; note = 2'-O-methyluridine-3'-phosphorothioate
  modified_base 3: mod_base = OTHER; note = 2'-O-methyluridine-3'-phosphate
  modified_base 4: mod_base = OTHER; note = 2'-O-methyladenosine-3'-phosphate
  modified_base 5: mod_base = OTHER; note = 2'-O-methyluridine-3'-phosphate
  modified_base 6: mod_base = OTHER; note = 2'-O-methylguanosine-3'-phosphate
  modified_base 7: mod_base = OTHER; note = 2'-fluoroadenosine-3'-phosphate
  modified_base 8: mod_base = OTHER; note = 2'-O-methylguanosine-3'-phosphate
  modified_base 9: mod_base = OTHER; note = 2'-fluoroguanosine-3'-phosphate
  modified_base 10: mod_base = OTHER; note = 2'-fluorouridine-3'-phosphate
  modified_base 11: mod_base = OTHER; note = 2'-fluoroguanosine-3'-phosphate
  modified_base 12: mod_base = OTHER; note = 2'-O-methyladenosine-3'-phosphate
  modified_base 13: mod_base = OTHER; note = 2'-O-methyluridine-3'-phosphate
  modified_base 14: mod_base = OTHER; note = 2'-O-methylcytidine-3'-phosphate
  modified_base 15: mod_base = OTHER; note = 2'-O-methyladenosine-3'-phosphate
  modified_base 16: mod_base = OTHER; note = 2'-O-methyladenosine-3'-phosphate
  modified_base 17: mod_base = OTHER; note = 2'-O-methyladenosine-3'-phosphate
  modified_base 18: mod_base = OTHER; note = 2'-O-methylcytidine-3'-phosphate
  modified_base 19: mod_base = OTHER; note = 2'-O-methyluridine-3'-phosphate
  modified_base 20: mod_base = OTHER; note = 2'-O-methylcytidine-3'-phosphate
  modified_base 21: mod_base = OTHER; note = 2'-O-methyladenosine-3'-phosphate attached to N-[tris(N-acetylgalactosamine-alkyl)-amidodecanoyl)]-4-hydr oxyprolinol Hyp-(N-acetylgalactosamine-alkyl)3
cttatgaggtgatcaaactca

SEQ ID NO: 3742 - RNA, 21 nt, synthetic construct
  misc_feature 1..21: note = Description of Artificial Sequence: Synthetic oligonucleotide
  source 1..21: mol_type = other RNA
  modified_base 1: mod_base = OTHER; note = 2'-O-methylcytidine-3'- phosphorothioate
  modified_base 2: mod_base = OTHER; note = 2'-O-methylcytidine-3'- phosphorothioate
  modified_base 3: mod_base = OTHER; note = 2'-O-methyluridine-3'-phosphate
  modified_base 4: mod_base = OTHER; note = 2'-O-methyluridine-3'-phosphate
  modified_base 5: mod_base = OTHER; note = 2'-O-methylguanosine-3'-phosphate
  modified_base 6: mod_base = OTHER; note = 2'-O-methylcytidine-3'-phosphate
  modified_base 7: mod_base = OTHER; note = 2'-fluoroadenosine-3'-phosphate
  modified_base 8: mod_base = OTHER; note = 2'-O-methyluridine-3'-phosphate
  modified_base 9: mod_base = OTHER; note = 2'-fluorouridine-3'-phosphate
  modified_base 10: mod_base = OTHER; note = 2'-fluorouridine-3'-phosphate
  modified_base 11: mod_base = OTHER; note = 2'-fluorouridine-3'-phosphate
  modified_base 12: mod_base = OTHER; note = 2'-O-methylguanosine-3'-phosphate
  modified_base 13: mod_base = OTHER; note = 2'-O-methylguanosine-3'-phosphate
  modified_base 14: mod_base = OTHER; note = 2'-O-methylguanosine-3'-phosphate
  modified_base 15: mod_base = OTHER; note = 2'-O-methyladenosine-3'-phosphate
  modified_base 16: mod_base = OTHER; note = 2'-O-methylcytidine-3'-phosphate
  modified_base 17: mod_base = OTHER; note = 2'-O-methyladenosine-3'-phosphate
  modified_base 18: mod_base = OTHER; note = 2'-O-methylguanosine-3'-phosphate
  modified_base 19: mod_base = OTHER; note = 2'-O-methyladenosine-3'-phosphate
  modified_base 20: mod_base = OTHER; note = 2'-O-methyladenosine-3'-phosphate
  modified_base 21: mod_base = OTHER; note = 2'-O-methyluridine-3'-phosphate attached to N-[tris(N-acetylgalactosamine-alkyl)-amidodecanoyl)]-4-hydr oxyprolinol Hyp-(N-acetylgalactosamine-alkyl)3
ccttgcattttgggacagaat

SEQ ID NO: 3743 - RNA, 21 nt, synthetic construct
  misc_feature 1..21: note = Description of Artificial Sequence: Synthetic oligonucleotide
  source 1..21: mol_type = other RNA
  modified_base 1: mod_base = OTHER; note = 2'-O-methylguanosine-3'- phosphorothioate
  modified_base 2: mod_base = OTHER; note = 2'-O-methylguanosine-3'- phosphorothioate
  modified_base 3: mod_base = OTHER; note = 2'-O-methyluridine-3'-phosphate
  modified_base 4: mod_base = OTHER; note = 2'-O-methyluridine-3'-phosphate
  modified_base 5: mod_base = OTHER; note = 2'-O-methylcytidine-3'-phosphate
  modified_base 6: mod_base = OTHER; note = 2'-O-methylcytidine-3'-phosphate
  modified_base 7: mod_base = OTHER; note = 2'-fluoroadenosine-3'-phosphate
  modified_base 8: mod_base = OTHER; note = 2'-O-methyladenosine-3'-phosphate
  modified_base 9: mod_base = OTHER; note = 2'-fluoroguanosine-3'-phosphate
  modified_base 10: mod_base = OTHER; note = 2'-fluorouridine-3'-phosphate
  modified_base 11: mod_base = OTHER; note = 2'-fluorocytidine-3'-phosphate
  modified_base 12: mod_base = OTHER; note = 2'-O-methylcytidine-3'-phosphate
  modified_base 13: mod_base = OTHER; note = 2'-O-methyladenosine-3'-phosphate
  modified_base 14: mod_base = OTHER; note = 2'-O-methyladenosine-3'-phosphate
  modified_base 15: mod_base = OTHER; note = 2'-O-methyluridine-3'-phosphate
  modified_base 16: mod_base = OTHER; note = 2'-O-methyladenosine-3'-phosphate
  modified_base 17: mod_base = OTHER; note = 2'-O-methyluridine-3'-phosphate
  modified_base 18: mod_base = OTHER; note = 2'-O-methylguanosine-3'-phosphate
  modified_base 19: mod_base = OTHER; note = 2'-O-methylguanosine-3'-phosphate
  modified_base 20: mod_base = OTHER; note = 2'-O-methylcytidine-3'-phosphate
  modified_base 21: mod_base = OTHER; note = 2'-O-methyladenosine-3'-phosphate attached to N-[tris(N-acetylgalactosamine-alkyl)-amidodecanoyl)]-4-hydr oxyprolinol Hyp-(N-acetylgalactosamine-alkyl)3
ggttccaagtccaatatggca

SEQ ID NO: 3744 - RNA, 21 nt, synthetic construct
  misc_feature 1..21: note = Description of Artificial Sequence: Synthetic oligonucleotide
  source 1..21: mol_type = other RNA
  modified_base 1: mod_base = OTHER; note = 2'-O-methylcytidine-3'- phosphorothioate
  modified_base 2: mod_base = OTHER; note = 2'-O-methyladenosine-3'- phosphorothioate
  modified_base 3: mod_base = OTHER; note = 2'-O-methylcytidine-3'-phosphate
  modified_base 4: mod_base = OTHER; note = 2'-O-methyluridine-3'-phosphate
  modified_base 5: mod_base = OTHER; note = 2'-O-methylguanosine-3'-phosphate
  modified_base 6: mod_base = OTHER; note = 2'-O-methyluridine-3'-phosphate
  modified_base 7: mod_base = OTHER; note = 2'-fluorocytidine-3'-phosphate
  modified_base 8: mod_base = OTHER; note = 2'-O-methyluridine-3'-phosphate
  modified_base 9: mod_base = OTHER; note = 2'-fluoroadenosine-3'-phosphate
  modified_base 10: mod_base = OTHER; note = 2'-fluoroguanosine-3'-phosphate
  modified_base 11: mod_base = OTHER; note = 2'-fluoroguanosine-3'-phosphate
  modified_base 12: mod_base = OTHER; note = 2'-O-methylcytidine-3'-phosphate
  modified_base 13: mod_base = OTHER; note = 2'-O-methyluridine-3'-phosphate
  modified_base 14: mod_base = OTHER; note = 2'-O-methyladenosine-3'-phosphate
  modified_base 15: mod_base = OTHER; note = 2'-O-methylcytidine-3'-phosphate
  modified_base 16: mod_base = OTHER; note = 2'-O-methyladenosine-3'-phosphate
  modified_base 17: mod_base = OTHER; note = 2'-O-methyladenosine-3'-phosphate
  modified_base 18: mod_base = OTHER; note = 2'-O-methylcytidine-3'-phosphate
  modified_base 19: mod_base = OTHER; note = 2'-O-methyladenosine-3'-phosphate
  modified_base 20: mod_base = OTHER; note = 2'-O-methylguanosine-3'-phosphate
  modified_base 21: mod_base = OTHER; note = 2'-O-methyladenosine-3'-phosphate attached to N-[tris(N-acetylgalactosamine-alkyl)-amidodecanoyl)]-4-hydr oxyprolinol Hyp-(N-acetylgalactosamine-alkyl)3
cactgtctaggctacaacaga

SEQ ID NO: 3745 - RNA, 21 nt, synthetic construct
  misc_feature 1..21: note = Description of Artificial Sequence: Synthetic oligonucleotide
  source 1..21: mol_type = other RNA
  modified_base 1: mod_base = OTHER; note = 2'-O-methyladenosine-3'- phosphorothioate
  modified_base 2: mod_base = OTHER; note = 2'-O-methylcytidine-3'- phosphorothioate
  modified_base 3: mod_base = OTHER; note = 2'-O-methyluridine-3'-phosphate
  modified_base 4: mod_base = OTHER; note = 2'-O-methylguanosine-3'-phosphate
  modified_base 5: mod_base = OTHER; note = 2'-O-methyluridine-3'-phosphate
  modified_base 6: mod_base = OTHER; note = 2'-O-methylcytidine-3'-phosphate
  modified_base 7: mod_base = OTHER; note = 2'-fluorouridine-3'-phosphate
  modified_base 8: mod_base = OTHER; note = 2'-O-methyladenosine-3'-phosphate
  modified_base 9: mod_base = OTHER; note = 2'-fluoroguanosine-3'-phosphate
  modified_base 10: mod_base = OTHER; note = 2'-fluoroguanosine-3'-phosphate
  modified_base 11: mod_base = OTHER; note = 2'-fluorocytidine-3'-phosphate
  modified_base 12: mod_base = OTHER; note = 2'-O-methyluridine-3'-phosphate
  modified_base 13: mod_base = OTHER; note = 2'-O-methyladenosine-3'-phosphate
  modified_base 14: mod_base = OTHER; note = 2'-O-methylcytidine-3'-phosphate
  modified_base 15: mod_base = OTHER; note = 2'-O-methyladenosine-3'-phosphate
  modified_base 16: mod_base = OTHER; note = 2'-O-methyladenosine-3'-phosphate
  modified_base 17: mod_base = OTHER; note = 2'-O-methylcytidine-3'-phosphate
  modified_base 18: mod_base = OTHER; note = 2'-O-methyladenosine-3'-phosphate
  modified_base 19: mod_base = OTHER; note = 2'-O-methylguanosine-3'-phosphate
  modified_base 20: mod_base = OTHER; note = 2'-O-methylguanosine-3'-phosphate
  modified_base 21: mod_base = OTHER; note = 2'-O-methyladenosine-3'-phosphate attached to N-[tris(N-acetylgalactosamine-alkyl)-amidodecanoyl)]-4-hydr oxyprolinol Hyp-(N-acetylgalactosamine-alkyl)3
actgtctaggctacaacagga

SEQ ID NO: 3746 - RNA, 21 nt, synthetic construct
  misc_feature 1..21: note = Description of Artificial Sequence: Synthetic oligonucleotide
  source 1..21: mol_type = other RNA
  modified_base 1: mod_base = OTHER; note = 2'-O-methyladenosine-3'- phosphorothioate
  modified_base 2: mod_base = OTHER; note = 2'-O-methyladenosine-3'- phosphorothioate
  modified_base 3: mod_base = OTHER; note = 2'-O-methyluridine-3'-phosphate
  modified_base 4: mod_base = OTHER; note = 2'-O-methyladenosine-3'-phosphate
  modified_base 5: mod_base = OTHER; note = 2'-O-methyladenosine-3'-phosphate
  modified_base 6: mod_base = OTHER; note = 2'-O-methylguanosine-3'-phosphate
  modified_base 7: mod_base = OTHER; note = 2'-fluoroadenosine-3'-phosphate
  modified_base 8: mod_base = OTHER; note = 2'-O-methyluridine-3'-phosphate
  modified_base 9: mod_base = OTHER; note = 2'-fluorouridine-3'-phosphate
  modified_base 10: mod_base = OTHER; note = 2'-fluoroadenosine-3'-phosphate
  modified_base 11: mod_base = OTHER; note = 2'-fluorocytidine-3'-phosphate
  modified_base 12: mod_base = OTHER; note = 2'-O-methyladenosine-3'-phosphate
  modified_base 13: mod_base = OTHER; note = 2'-O-methylguanosine-3'-phosphate
  modified_base 14: mod_base = OTHER; note = 2'-O-methyluridine-3'-phosphate
  modified_base 15: mod_base = OTHER; note = 2'-O-methyluridine-3'-phosphate
  modified_base 16: mod_base = OTHER; note = 2'-O-methylguanosine-3'-phosphate
  modified_base 17: mod_base = OTHER; note = 2'-O-methyluridine-3'-phosphate
  modified_base 18: mod_base = OTHER; note = 2'-O-methyluridine-3'-phosphate
  modified_base 19: mod_base = OTHER; note = 2'-O-methylguanosine-3'-phosphate
  modified_base 20: mod_base = OTHER; note = 2'-O-methylguanosine-3'-phosphate
  modified_base 21: mod_base = OTHER; note = 2'-O-methyladenosine-3'-phosphate attached to N-[tris(N-acetylgalactosamine-alkyl)-amidodecanoyl)]-4-hydr oxyprolinol Hyp-(N-acetylgalactosamine-alkyl)3
aataagattacagttgttgga

SEQ ID NO: 3747 - RNA, 21 nt, synthetic construct
  misc_feature 1..21: note = Description of Artificial Sequence: Synthetic oligonucleotide
  source 1..21: mol_type = other RNA
  modified_base 1: mod_base = OTHER; note = 2'-O-methylguanosine-3'- phosphorothioate
  modified_base 2: mod_base = OTHER; note = 2'-O-methyluridine-3'-phosphorothioate
  modified_base 3: mod_base = OTHER; note = 2'-O-methyluridine-3'-phosphate
  modified_base 4: mod_base = OTHER; note = 2'-O-methylguanosine-3'-phosphate
  modified_base 5: mod_base = OTHER; note = 2'-O-methyladenosine-3'-phosphate
  modified_base 6: mod_base = OTHER; note = 2'-O-methylguanosine-3'-phosphate
  modified_base 7: mod_base = OTHER; note = 2'-fluoroadenosine-3'-phosphate
  modified_base 8: mod_base = OTHER; note = 2'-O-methylguanosine-3'-phosphate
  modified_base 9: mod_base = OTHER; note = 2'-fluorouridine-3'-phosphate
  modified_base 10: mod_base = OTHER; note = 2'-fluoroguanosine-3'-phosphate
  modified_base 11: mod_base = OTHER; note = 2'-fluorocytidine-3'-phosphate
  modified_base 12: mod_base = OTHER; note = 2'-O-methyluridine-3'-phosphate
  modified_base 13: mod_base = OTHER; note = 2'-O-methyluridine-3'-phosphate
  modified_base 14: mod_base = OTHER; note = 2'-O-methyladenosine-3'-phosphate
  modified_base 15: mod_base = OTHER; note = 2'-O-methyluridine-3'-phosphate
  modified_base 16: mod_base = OTHER; note = 2'-O-methylguanosine-3'-phosphate
  modified_base 17: mod_base = OTHER; note = 2'-O-methyladenosine-3'-phosphate
  modified_base 18: mod_base = OTHER; note = 2'-O-methylguanosine-3'-phosphate
  modified_base 19: mod_base = OTHER; note = 2'-O-methylguanosine-3'-phosphate
  modified_base 20: mod_base = OTHER; note = 2'-O-methyluridine-3'-phosphate
  modified_base 21: mod_base = OTHER; note = 2'-O-methyladenosine-3'-phosphate attached to N-[tris(N-acetylgalactosamine-alkyl)-amidodecanoyl)]-4-hydr oxyprolinol Hyp-(N-acetylgalactosamine-alkyl)3
gttgagagtgcttatgaggta

SEQ ID NO: 3748 - RNA, 21 nt, synthetic construct
  misc_feature 1..21: note = Description of Artificial Sequence: Synthetic oligonucleotide
  source 1..21: mol_type = other RNA
  modified_base 1: mod_base = OTHER; note = 2'-O-methylguanosine-3'- phosphorothioate
  modified_base 2: mod_base = OTHER; note = 2'-O-methyluridine-3'-phosphorothioate
  modified_base 3: mod_base = OTHER; note = 2'-O-methylcytidine-3'-phosphate
  modified_base 4: mod_base = OTHER; note = 2'-O-methyluridine-3'-phosphate
  modified_base 5: mod_base = OTHER; note = 2'-O-methyladenosine-3'-phosphate
  modified_base 6: mod_base = OTHER; note = 2'-O-methylguanosine-3'-phosphate
  modified_base 7: mod_base = OTHER; note = 2'-fluoroguanosine-3'-phosphate
  modified_base 8: mod_base = OTHER; note = 2'-O-methylcytidine-3'-phosphate
  modified_base 9: mod_base = OTHER; note = 2'-fluorouridine-3'-phosphate
  modified_base 10: mod_base = OTHER; note = 2'-fluoroadenosine-3'-phosphate
  modified_base 11: mod_base = OTHER; note = 2'-fluorocytidine-3'-phosphate
  modified_base 12: mod_base = OTHER; note = 2'-O-methyladenosine-3'-phosphate
  modified_base 13: mod_base = OTHER; note = 2'-O-methyladenosine-3'-phosphate
  modified_base 14: mod_base = OTHER; note = 2'-O-methylcytidine-3'-phosphate
  modified_base 15: mod_base = OTHER; note = 2'-O-methyladenosine-3'-phosphate
  modified_base 16: mod_base = OTHER; note = 2'-O-methylguanosine-3'-phosphate
  modified_base 17: mod_base = OTHER; note = 2'-O-methylguanosine-3'-phosphate
  modified_base 18: mod_base = OTHER; note = 2'-O-methyladenosine-3'-phosphate
  modified_base 19: mod_base = OTHER; note = 2'-O-methyluridine-3'-phosphate
  modified_base 20: mod_base = OTHER; note = 2'-O-methyluridine-3'-phosphate
  modified_base 21: mod_base = OTHER; note = 2'-O-methyladenosine-3'-phosphate attached to N-[tris(N-acetylgalactosamine-alkyl)-amidodecanoyl)]-4-hydr oxyprolinol Hyp-(N-acetylgalactosamine-alkyl)3
gtctaggctacaacaggatta

SEQ ID NO: 3749 - RNA, 21 nt, synthetic construct
  misc_feature 1..21: note = Description of Artificial Sequence: Synthetic oligonucleotide
  source 1..21: mol_type = other RNA
  modified_base 1: mod_base = OTHER; note = 2'-O-methyluridine-3'-phosphorothioate
  modified_base 2: mod_base = OTHER; note = 2'-O-methylcytidine-3'- phosphorothioate
  modified_base 3: mod_base = OTHER; note = 2'-O-methyluridine-3'-phosphate
  modified_base 4: mod_base = OTHER; note = 2'-O-methyladenosine-3'-phosphate
  modified_base 5: mod_base = OTHER; note = 2'-O-methylguanosine-3'-phosphate
  modified_base 6: mod_base = OTHER; note = 2'-O-methylguanosine-3'-phosphate
  modified_base 7: mod_base = OTHER; note = 2'-fluorocytidine-3'-phosphate
  modified_base 8: mod_base = OTHER; note = 2'-O-methyluridine-3'-phosphate
  modified_base 9: mod_base = OTHER; note = 2'-fluoroadenosine-3'-phosphate
  modified_base 10: mod_base = OTHER; note = 2'-fluorocytidine-3'-phosphate
  modified_base 11: mod_base = OTHER; note = 2'-fluoroadenosine-3'-phosphate
  modified_base 12: mod_base = OTHER; note = 2'-O-methyladenosine-3'-phosphate
  modified_base 13: mod_base = OTHER; note = 2'-O-methylcytidine-3'-phosphate
  modified_base 14: mod_base = OTHER; note = 2'-O-methyladenosine-3'-phosphate
  modified_base 15: mod_base = OTHER; note = 2'-O-methylguanosine-3'-phosphate
  modified_base 16: mod_base = OTHER; note = 2'-O-methylguanosine-3'-phosphate
  modified_base 17: mod_base = OTHER; note = 2'-O-methyladenosine-3'-phosphate
  modified_base 18: mod_base = OTHER; note = 2'-O-methyluridine-3'-phosphate
  modified_base 19: mod_base = OTHER; note = 2'-O-methyluridine-3'-phosphate
  modified_base 20: mod_base = OTHER; note = 2'-O-methylcytidine-3'-phosphate
  modified_base 21: mod_base = OTHER; note = 2'-O-methyluridine-3'-phosphate attached to N-[tris(N-acetylgalactosamine-alkyl)-amidodecanoyl)]-4-hydr oxyprolinol Hyp-(N-acetylgalactosamine-alkyl)3
tctaggctacaacaggattct

SEQ ID NO: 3750 - RNA, 21 nt, synthetic construct
  misc_feature 1..21: note = Description of Artificial Sequence: Synthetic oligonucleotide
  source 1..21: mol_type = other RNA
  modified_base 1: mod_base = OTHER; note = 2'-O-methylguanosine-3'- phosphorothioate
  modified_base 2: mod_base = OTHER; note = 2'-O-methyluridine-3'-phosphorothioate
  modified_base 3: mod_base = OTHER; note = 2'-O-methylguanosine-3'-phosphate
  modified_base 4: mod_base = OTHER; note = 2'-O-methylguanosine-3'-phosphate
  modified_base 5: mod_base = OTHER; note = 2'-O-methyladenosine-3'-phosphate
  modified_base 6: mod_base = OTHER; note = 2'-O-methylguanosine-3'-phosphate
  modified_base 7: mod_base = OTHER; note = 2'-fluoroguanosine-3'-phosphate
  modified_base 8: mod_base = OTHER; note = 2'-O-methyluridine-3'-phosphate
  modified_base 9: mod_base = OTHER; note = 2'-fluorouridine-3'-phosphate
  modified_base 10: mod_base = OTHER; note = 2'-fluoroguanosine-3'-phosphate
  modified_base 11: mod_base = OTHER; note = 2'-fluorouridine-3'-phosphate
  modified_base 12: mod_base = OTHER; note = 2'-O-methylguanosine-3'-phosphate
  modified_base 13: mod_base = OTHER; note = 2'-O-methylcytidine-3'-phosphate
  modified_base 14: mod_base = OTHER; note = 2'-O-methyladenosine-3'-phosphate
  modified_base 15: mod_base = OTHER; note = 2'-O-methyluridine-3'-phosphate
  modified_base 16: mod_base = OTHER; note = 2'-O-methylguanosine-3'-phosphate
  modified_base 17: mod_base = OTHER; note = 2'-O-methyluridine-3'-phosphate
  modified_base 18: mod_base = OTHER; note = 2'-O-methyluridine-3'-phosphate
  modified_base 19: mod_base = OTHER; note = 2'-O-methylguanosine-3'-phosphate
  modified_base 20: mod_base = OTHER; note = 2'-O-methyluridine-3'-phosphate
  modified_base 21: mod_base = OTHER; note = 2'-O-methyladenosine-3'-phosphate attached to N-[tris(N-acetylgalactosamine-alkyl)-amidodecanoyl)]-4-hydr oxyprolinol Hyp-(N-acetylgalactosamine-alkyl)3
gtggaggttgtgcatgttgta

SEQ ID NO: 3751 - RNA, 21 nt, synthetic construct
  misc_feature 1..21: note = Description of Artificial Sequence: Synthetic oligonucleotide
  source 1..21: mol_type = other RNA
  modified_base 1: mod_base = OTHER; note = 2'-O-methyluridine-3'-phosphorothioate
  modified_base 2: mod_base = OTHER; note = 2'-O-methylguanosine-3'- phosphorothioate
  modified_base 3: mod_base = OTHER; note = 2'-O-methyladenosine-3'-phosphate
  modified_base 4: mod_base = OTHER; note = 2'-O-methylguanosine-3'-phosphate
  modified_base 5: mod_base = OTHER; note = 2'-O-methylguanosine-3'-phosphate
  modified_base 6: mod_base = OTHER; note = 2'-O-methyluridine-3'-phosphate
  modified_base 7: mod_base = OTHER; note = 2'-fluoroguanosine-3'-phosphate
  modified_base 8: mod_base = OTHER; note = 2'-O-methyladenosine-3'-phosphate
  modified_base 9: mod_base = OTHER; note = 2'-fluorouridine-3'-phosphate
  modified_base 10: mod_base = OTHER; note = 2'-fluorocytidine-3'-phosphate
  modified_base 11: mod_base = OTHER; note = 2'-fluoroadenosine-3'-phosphate
  modified_base 12: mod_base = OTHER; note = 2'-O-methyladenosine-3'-phosphate
  modified_base 13: mod_base = OTHER; note = 2'-O-methyladenosine-3'-phosphate
  modified_base 14: mod_base = OTHER; note = 2'-O-methylcytidine-3'-phosphate
  modified_base 15: mod_base = OTHER; note = 2'-O-methyluridine-3'-phosphate
  modified_base 16: mod_base = OTHER; note = 2'-O-methylcytidine-3'-phosphate
  modified_base 17: mod_base = OTHER; note = 2'-O-methyladenosine-3'-phosphate
  modified_base 18: mod_base = OTHER; note = 2'-O-methyladenosine-3'-phosphate
  modified_base 19: mod_base = OTHER; note = 2'-O-methyladenosine-3'-phosphate
  modified_base 20: mod_base = OTHER; note = 2'-O-methylguanosine-3'-phosphate
  modified_base 21: mod_base = OTHER; note = 2'-O-methyladenosine-3'-phosphate attached to N-[tris(N-acetylgalactosamine-alkyl)-amidodecanoyl)]-4-hydr oxyprolinol Hyp-(N-acetylgalactosamine-alkyl)3
tgaggtgatcaaactcaaaga

SEQ ID NO: 3752 - RNA, 21 nt, synthetic construct
  misc_feature 1..21: note = Description of Artificial Sequence: Synthetic oligonucleotide
  source 1..21: mol_type = other RNA
  modified_base 1: mod_base = OTHER; note = 2'-O-methylguanosine-3'- phosphorothioate
  modified_base 2: mod_base = OTHER; note = 2'-O-methyluridine-3'-phosphorothioate
  modified_base 3: mod_base = OTHER; note = 2'-O-methylguanosine-3'-phosphate
  modified_base 4: mod_base = OTHER; note = 2'-O-methyladenosine-3'-phosphate
  modified_base 5: mod_base = OTHER; note = 2'-O-methyluridine-3'-phosphate
  modified_base 6: mod_base = OTHER; note = 2'-O-methylcytidine-3'-phosphate
  modified_base 7: mod_base = OTHER; note = 2'-fluoroadenosine-3'-phosphate
  modified_base 8: mod_base = OTHER; note = 2'-O-methyladenosine-3'-phosphate
  modified_base 9: mod_base = OTHER; note = 2'-fluoroadenosine-3'-phosphate
  modified_base 10: mod_base = OTHER; note = 2'-fluorocytidine-3'-phosphate
  modified_base 11: mod_base = OTHER; note = 2'-fluorouridine-3'-phosphate
  modified_base 12: mod_base = OTHER; note = 2'-O-methylcytidine-3'-phosphate
  modified_base 13: mod_base = OTHER; note = 2'-O-methyladenosine-3'-phosphate
  modified_base 14: mod_base = OTHER; note = 2'-O-methyladenosine-3'-phosphate
  modified_base 15: mod_base = OTHER; note = 2'-O-methyladenosine-3'-phosphate
  modified_base 16: mod_base = OTHER; note = 2'-O-methylguanosine-3'-phosphate
  modified_base 17: mod_base = OTHER; note = 2'-O-methylguanosine-3'-phosphate
  modified_base 18: mod_base = OTHER; note = 2'-O-methylcytidine-3'-phosphate
  modified_base 19: mod_base = OTHER; note = 2'-O-methyluridine-3'-phosphate
  modified_base 20: mod_base = OTHER; note = 2'-O-methyladenosine-3'-phosphate
  modified_base 21: mod_base = OTHER; note = 2'-O-methyladenosine-3'-phosphate attached to N-[tris(N-acetylgalactosamine-alkyl)-amidodecanoyl)]-4-hydr oxyprolinol Hyp-(N-acetylgalactosamine-alkyl)3
gtgatcaaactcaaaggctaa

SEQ ID NO: 3753 - RNA, 21 nt, synthetic construct
  misc_feature 1..21: note = Description of Artificial Sequence: Synthetic oligonucleotide
  source 1..21: mol_type = other RNA
  modified_base 1: mod_base = OTHER; note = 2'-O-methyluridine-3'-phosphorothioate
  modified_base 2: mod_base = OTHER; note = 2'-O-methylguanosine-3'- phosphorothioate
  modified_base 3: mod_base = OTHER; note = 2'-O-methyladenosine-3'-phosphate
  modified_base 4: mod_base = OTHER; note = 2'-O-methylguanosine-3'-phosphate
  modified_base 5: mod_base = OTHER; note = 2'-O-methylguanosine-3'-phosphate
  modified_base 6: mod_base = OTHER; note = 2'-O-methyladenosine-3'-phosphate
  modified_base 7: mod_base = OTHER; note = 2'-fluoroadenosine-3'-phosphate
  modified_base 8: mod_base = OTHER; note = 2'-O-methylguanosine-3'-phosphate
  modified_base 9: mod_base = OTHER; note = 2'-fluoroadenosine-3'-phosphate
  modified_base 10: mod_base = OTHER; note = 2'-fluoroguanosine-3'-phosphate
  modified_base 11: mod_base = OTHER; note = 2'-fluoroguanosine-3'-phosphate
  modified_base 12: mod_base = OTHER; note = 2'-O-methylcytidine-3'-phosphate
  modified_base 13: mod_base = OTHER; note = 2'-O-methylcytidine-3'-phosphate
  modified_base 14: mod_base = OTHER; note = 2'-O-methylcytidine-3'-phosphate
  modified_base 15: mod_base = OTHER; note = 2'-O-methylguanosine-3'-phosphate
  modified_base 16: mod_base = OTHER; note = 2'-O-methyluridine-3'-phosphate
  modified_base 17: mod_base = OTHER; note = 2'-O-methyluridine-3'-phosphate
  modified_base 18: mod_base = OTHER; note = 2'-O-methyluridine-3'-phosphate
  modified_base 19: mod_base = OTHER; note = 2'-O-methylguanosine-3'-phosphate
  modified_base 20: mod_base = OTHER; note = 2'-O-methyladenosine-3'-phosphate
  modified_base 21: mod_base = OTHER; note = 2'-O-methyladenosine-3'-phosphate attached to N-[tris(N-acetylgalactosamine-alkyl)-amidodecanoyl)]-4-hydr oxyprolinol Hyp-(N-acetylgalactosamine-alkyl)3
tgaggaagaggcccgtttgaa

SEQ ID NO: 3754 - RNA, 21 nt, synthetic construct
  misc_feature 1..21: note = Description of Artificial Sequence: Synthetic oligonucleotide
  source 1..21: mol_type = other RNA
  modified_base 1: mod_base = OTHER; note = 2'-O-methyladenosine-3'- phosphorothioate
  modified_base 2: mod_base = OTHER; note = 2'-O-methylcytidine-3'- phosphorothioate
  modified_base 3: mod_base = OTHER; note = 2'-O-methyladenosine-3'-phosphate
  modified_base 4: mod_base = OTHER; note = 2'-O-methyladenosine-3'-phosphate
  modified_base 5: mod_base = OTHER; note = 2'-O-methylguanosine-3'-phosphate
  modified_base 6: mod_base = OTHER; note = 2'-O-methylcytidine-3'-phosphate
  modified_base 7: mod_base = OTHER; note = 2'-fluoroadenosine-3'-phosphate
  modified_base 8: mod_base = OTHER; note = 2'-O-methylguanosine-3'-phosphate
  modified_base 9: mod_base = OTHER; note = 2'-fluoroguanosine-3'-phosphate
  modified_base 10: mod_base = OTHER; note = 2'-fluorouridine-3'-phosphate
  modified_base 11: mod_base = OTHER; note = 2'-fluoroguanosine-3'-phosphate
  modified_base 12: mod_base = OTHER; note = 2'-O-methylguanosine-3'-phosphate
  modified_base 13: mod_base = OTHER; note = 2'-O-methyluridine-3'-phosphate
  modified_base 14: mod_base = OTHER; note = 2'-O-methyluridine-3'-phosphate
  modified_base 15: mod_base = OTHER; note = 2'-O-methylguanosine-3'-phosphate
  modified_base 16: mod_base = OTHER; note = 2'-O-methyladenosine-3'-phosphate
  modified_base 17: mod_base = OTHER; note = 2'-O-methylguanosine-3'-phosphate
  modified_base 18: mod_base = OTHER; note = 2'-O-methyladenosine-3'-phosphate
  modified_base 19: mod_base = OTHER; note = 2'-O-methylguanosine-3'-phosphate
  modified_base 20: mod_base = OTHER; note = 2'-O-methyluridine-3'-phosphate
  modified_base 21: mod_base = OTHER; note = 2'-O-methyladenosine-3'-phosphate attached to N-[tris(N-acetylgalactosamine-alkyl)-amidodecanoyl)]-4-hydr oxyprolinol Hyp-(N-acetylgalactosamine-alkyl)3
acaagcaggtggttgagagta

SEQ ID NO: 3755 - RNA, 21 nt, synthetic construct
  misc_feature 1..21: note = Description of Artificial Sequence: Synthetic oligonucleotide
  source 1..21: mol_type = other RNA
  modified_base 1: mod_base = OTHER; note = 2'-O-methylcytidine-3'- phosphorothioate
  modified_base 2: mod_base = OTHER; note = 2'-O-methyladenosine-3'- phosphorothioate
  modified_base 3: mod_base = OTHER; note = 2'-O-methylguanosine-3'-phosphate
  modified_base 4: mod_base = OTHER; note = 2'-O-methyladenosine-3'-phosphate
  modified_base 5: mod_base = OTHER; note = 2'-O-methyluridine-3'-phosphate
  modified_base 6: mod_base = OTHER; note = 2'-O-methyluridine-3'-phosphate
  modified_base 7: mod_base = OTHER; note = 2'-fluorouridine-3'-phosphate
  modified_base 8: mod_base = OTHER; note = 2'-O-methylguanosine-3'-phosphate
  modified_base 9: mod_base = OTHER; note = 2'-fluoroguanosine-3'-phosphate
  modified_base 10: mod_base = OTHER; note = 2'-fluorocytidine-3'-phosphate
  modified_base 11: mod_base = OTHER; note = 2'-fluoroadenosine-3'-phosphate
  modified_base 12: mod_base = OTHER; note = 2'-O-methylguanosine-3'-phosphate
  modified_base 13: mod_base = OTHER; note = 2'-O-methyladenosine-3'-phosphate
  modified_base 14: mod_base = OTHER; note = 2'-O-methylguanosine-3'-phosphate
  modified_base 15: mod_base = OTHER; note = 2'-O-methyladenosine-3'-phosphate
  modified_base 16: mod_base = OTHER; note = 2'-O-methylguanosine-3'-phosphate
  modified_base 17: mod_base = OTHER; note = 2'-O-methyluridine-3'-phosphate
  modified_base 18: mod_base = OTHER; note = 2'-O-methyladenosine-3'-phosphate
  modified_base 19: mod_base = OTHER; note = 2'-O-methyluridine-3'-phosphate
  modified_base 20: mod_base = OTHER; note = 2'-O-methyladenosine-3'-phosphate
  modified_base 21: mod_base = OTHER; note = 2'-O-methyladenosine-3'-phosphate attached to N-[tris(N-acetylgalactosamine-alkyl)-amidodecanoyl)]-4-hydr oxyprolinol Hyp-(N-acetylgalactosamine-alkyl)3
cagatttggcagagagtataa

SEQ ID NO: 3756 - RNA, 21 nt, synthetic construct
  misc_feature 1..21: note = Description of Artificial Sequence: Synthetic oligonucleotide
  source 1..21: mol_type = other RNA
  modified_base 1: mod_base = OTHER; note = 2'-O-methylguanosine-3'- phosphorothioate
  modified_base 2: mod_base = OTHER; note = 2'-O-methyluridine-3'-phosphorothioate
  modified_base 3: mod_base = OTHER; note = 2'-O-methylguanosine-3'-phosphate
  modified_base 4: mod_base = OTHER; note = 2'-O-methylcytidine-3'-phosphate
  modified_base 5: mod_base = OTHER; note = 2'-O-methyluridine-3'-phosphate
  modified_base 6: mod_base = OTHER; note = 2'-O-methyluridine-3'-phosphate
  modified_base 7: mod_base = OTHER; note = 2'-fluoroadenosine-3'-phosphate
  modified_base 8: mod_base = OTHER; note = 2'-O-methyluridine-3'-phosphate
  modified_base 9: mod_base = OTHER; note = 2'-fluoroguanosine-3'-phosphate
  modified_base 10: mod_base = OTHER; note = 2'-fluoroadenosine-3'-phosphate
  modified_base 11: mod_base = OTHER; note = 2'-fluoroguanosine-3'-phosphate
  modified_base 12: mod_base = OTHER; note = 2'-O-methylguanosine-3'-phosphate
  modified_base 13: mod_base = OTHER; note = 2'-O-methyluridine-3'-phosphate
  modified_base 14: mod_base = OTHER; note = 2'-O-methylguanosine-3'-phosphate
  modified_base 15: mod_base = OTHER; note = 2'-O-methyladenosine-3'-phosphate
  modified_base 16: mod_base = OTHER; note = 2'-O-methyluridine-3'-phosphate
  modified_base 17: mod_base = OTHER; note = 2'-O-methylcytidine-3'-phosphate
  modified_base 18: mod_base = OTHER; note = 2'-O-methyladenosine-3'-phosphate
  modified_base 19: mod_base = OTHER; note = 2'-O-methyladenosine-3'-phosphate
  modified_base 20: mod_base = OTHER; note = 2'-O-methyladenosine-3'-phosphate
  modified_base 21: mod_base = OTHER; note = 2'-O-methylcytidine-3'-phosphate attached to N-[tris(N-acetylgalactosamine-alkyl)-amidodecanoyl)]-4-hydr oxyprolinol Hyp-(N-acetylgalactosamine-alkyl)3
gtgcttatgaggtgatcaaac

SEQ ID NO: 3757 - RNA, 21 nt, synthetic construct
  misc_feature 1..21: note = Description of Artificial Sequence: Synthetic oligonucleotide
  source 1..21: mol_type = other RNA
  modified_base 1: mod_base = OTHER; note = 2'-O-methyladenosine-3'- phosphorothioate
  modified_base 2: mod_base = OTHER; note = 2'-O-methylguanosine-3'- phosphorothioate
  modified_base 3: mod_base = OTHER; note = 2'-O-methylcytidine-3'-phosphate
  modified_base 4: mod_base = OTHER; note = 2'-O-methyladenosine-3'-phosphate
  modified_base 5: mod_base = OTHER; note = 2'-O-methylguanosine-3'-phosphate
  modified_base 6: mod_base = OTHER; note = 2'-O-methyladenosine-3'-phosphate
  modified_base 7: mod_base = OTHER; note = 2'-fluorouridine-3'-phosphate
  modified_base 8: mod_base = OTHER; note = 2'-O-methyluridine-3'-phosphate
  modified_base 9: mod_base = OTHER; note = 2'-fluorouridine-3'-phosphate
  modified_base 10: mod_base = OTHER; note = 2'-fluoroguanosine-3'-phosphate
  modified_base 11: mod_base = OTHER; note = 2'-fluoroguanosine-3'-phosphate
  modified_base 12: mod_base = OTHER; note = 2'-O-methylcytidine-3'-phosphate
  modified_base 13: mod_base = OTHER; note = 2'-O-methyladenosine-3'-phosphate
  modified_base 14: mod_base = OTHER; note = 2'-O-methylguanosine-3'-phosphate
  modified_base 15: mod_base = OTHER; note = 2'-O-methyladenosine-3'-phosphate
  modified_base 16: mod_base = OTHER; note = 2'-O-methylguanosine-3'-phosphate
  modified_base 17: mod_base = OTHER; note = 2'-O-methyladenosine-3'-phosphate
  modified_base 18: mod_base = OTHER; note = 2'-O-methylguanosine-3'-phosphate
  modified_base 19: mod_base = OTHER; note = 2'-O-methyluridine-3'-phosphate
  modified_base 20: mod_base = OTHER; note = 2'-O-methyladenosine-3'-phosphate
  modified_base 21: mod_base = OTHER; note = 2'-O-methyluridine-3'-phosphate attached to N-[tris(N-acetylgalactosamine-alkyl)-amidodecanoyl)]-4-hydr oxyprolinol Hyp-(N-acetylgalactosamine-alkyl)3
agcagatttggcagagagtat

SEQ ID NO: 3758 - RNA, 21 nt, synthetic construct
  misc_feature 1..21: note = Description of Artificial Sequence: Synthetic oligonucleotide
  source 1..21: mol_type = other RNA
  modified_base 1: mod_base = OTHER; note = 2'-O-methyladenosine-3'- phosphorothioate
  modified_base 2: mod_base = OTHER; note = 2'-O-methyluridine-3'-phosphorothioate
  modified_base 3: mod_base = OTHER; note = 2'-O-methyluridine-3'-phosphate
  modified_base 4: mod_base = OTHER; note = 2'-O-methyluridine-3'-phosphate
  modified_base 5: mod_base = OTHER; note = 2'-O-methylguanosine-3'-phosphate
  modified_base 6: mod_base = OTHER; note = 2'-O-methylguanosine-3'-phosphate
  modified_base 7: mod_base = OTHER; note = 2'-fluorocytidine-3'-phosphate
  modified_base 8: mod_base = OTHER; note = 2'-O-methyladenosine-3'-phosphate
  modified_base 9: mod_base = OTHER; note = 2'-fluoroguanosine-3'-phosphate
  modified_base 10: mod_base = OTHER; note = 2'-fluoroadenosine-3'-phosphate
  modified_base 11: mod_base = OTHER; note = 2'-fluoroguanosine-3'-phosphate
  modified_base 12: mod_base = OTHER; note = 2'-O-methyladenosine-3'-phosphate
  modified_base 13: mod_base = OTHER; note = 2'-O-methylguanosine-3'-phosphate
  modified_base 14: mod_base = OTHER; note = 2'-O-methyluridine-3'-phosphate
  modified_base 15: mod_base = OTHER; note = 2'-O-methyladenosine-3'-phosphate
  modified_base 16: mod_base = OTHER; note = 2'-O-methyluridine-3'-phosphate
  modified_base 17: mod_base = OTHER; note = 2'-O-methyladenosine-3'-phosphate
  modified_base 18: mod_base = OTHER; note = 2'-O-methyladenosine-3'-phosphate
  modified_base 19: mod_base = OTHER; note = 2'-O-methyluridine-3'-phosphate
  modified_base 20: mod_base = OTHER; note = 2'-O-methylguanosine-3'-phosphate
  modified_base 21: mod_base = OTHER; note = 2'-O-methyladenosine-3'-phosphate attached to N-[tris(N-acetylgalactosamine-alkyl)-amidodecanoyl)]-4-hydr oxyprolinol Hyp-(N-acetylgalactosamine-alkyl)3
atttggcagagagtataatga

SEQ ID NO: 3759 - RNA, 21 nt, synthetic construct
  misc_feature 1..21: note = Description of Artificial Sequence: Synthetic oligonucleotide
  source 1..21: mol_type = other RNA
  modified_base 1: mod_base = OTHER; note = 2'-O-methyluridine-3'-phosphorothioate
  modified_base 2: mod_base = OTHER; note = 2'-O-methyluridine-3'-phosphorothioate
  modified_base 3: mod_base = OTHER; note = 2'-O-methyluridine-3'-phosphate
  modified_base 4: mod_base = OTHER; note = 2'-O-methylguanosine-3'-phosphate
  modified_base 5: mod_base = OTHER; note = 2'-O-methylguanosine-3'-phosphate
  modified_base 6: mod_base = OTHER; note = 2'-O-methylcytidine-3'-phosphate
  modified_base 7: mod_base = OTHER; note = 2'-fluoroadenosine-3'-phosphate
  modified_base 8: mod_base = OTHER; note = 2'-O-methylguanosine-3'-phosphate
  modified_base 9: mod_base = OTHER; note = 2'-fluoroadenosine-3'-phosphate
  modified_base 10: mod_base = OTHER; note = 2'-fluoroguanosine-3'-phosphate
  modified_base 11: mod_base = OTHER; note = 2'-fluoroadenosine-3'-phosphate
  modified_base 12: mod_base = OTHER; note = 2'-O-methylguanosine-3'-phosphate
  modified_base 13: mod_base = OTHER; note = 2'-O-methyluridine-3'-phosphate
  modified_base 14: mod_base = OTHER; note = 2'-O-methyladenosine-3'-phosphate
  modified_base 15: mod_base = OTHER; note = 2'-O-methyluridine-3'-phosphate
  modified_base 16: mod_base = OTHER; note = 2'-O-methyladenosine-3'-phosphate
  modified_base 17: mod_base = OTHER; note = 2'-O-methyladenosine-3'-phosphate
  modified_base 18: mod_base = OTHER; note = 2'-O-methyluridine-3'-phosphate
  modified_base 19: mod_base = OTHER; note = 2'-O-methylguanosine-3'-phosphate
  modified_base 20: mod_base = OTHER; note = 2'-O-methyladenosine-3'-phosphate
  modified_base 21: mod_base = OTHER; note = 2'-O-methyladenosine-3'-phosphate attached to N-[tris(N-acetylgalactosamine-alkyl)-amidodecanoyl)]-4-hydr oxyprolinol Hyp-(N-acetylgalactosamine-alkyl)3
tttggcagagagtataatgaa

SEQ ID NO: 3760 - RNA, 21 nt, synthetic construct
  misc_feature 1..21: note = Description of Artificial Sequence: Synthetic oligonucleotide
  source 1..21: mol_type = other RNA
  modified_base 1: mod_base = OTHER; note = 2'-O-methylcytidine-3'- phosphorothioate
  modified_base 2: mod_base = OTHER; note = 2'-O-methyluridine-3'-phosphorothioate
  modified_base 3: mod_base = OTHER; note = 2'-O-methyluridine-3'-phosphate
  modified_base 4: mod_base = OTHER; note = 2'-O-methylguanosine-3'-phosphate
  modified_base 5: mod_base = OTHER; note = 2'-O-methylcytidine-3'-phosphate
  modified_base 6: mod_base = OTHER; note = 2'-O-methyladenosine-3'-phosphate
  modified_base 7: mod_base = OTHER; note = 2'-fluorouridine-3'-phosphate
  modified_base 8: mod_base = OTHER; note = 2'-O-methyluridine-3'-phosphate
  modified_base 9: mod_base = OTHER; note = 2'-fluorouridine-3'-phosphate
  modified_base 10: mod_base = OTHER; note = 2'-fluorouridine-3'-phosphate
  modified_base 11: mod_base = OTHER; note = 2'-fluoroguanosine-3'-phosphate
  modified_base 12: mod_base = OTHER; note = 2'-O-methylguanosine-3'-phosphate
  modified_base 13: mod_base = OTHER; note = 2'-O-methylguanosine-3'-phosphate
  modified_base 14: mod_base = OTHER; note = 2'-O-methyladenosine-3'-phosphate
  modified_base 15: mod_base = OTHER; note = 2'-O-methylcytidine-3'-phosphate
  modified_base 16: mod_base = OTHER; note = 2'-O-methyladenosine-3'-phosphate
  modified_base 17: mod_base = OTHER; note = 2'-O-methylguanosine-3'-phosphate
  modified_base 18: mod_base = OTHER; note = 2'-O-methyladenosine-3'-phosphate
  modified_base 19: mod_base = OTHER; note = 2'-O-methyladenosine-3'-phosphate
  modified_base 20: mod_base = OTHER; note = 2'-O-methyluridine-3'-phosphate
  modified_base 21: mod_base = OTHER; note = 2'-O-methyladenosine-3'-phosphate attached to N-[tris(N-acetylgalactosamine-alkyl)-amidodecanoyl)]-4-hydr oxyprolinol Hyp-(N-acetylgalactosamine-alkyl)3
cttgcattttgggacagaata

SEQ ID NO: 3761 - RNA, 21 nt, synthetic construct
  misc_feature 1..21: note = Description of Artificial Sequence: Synthetic oligonucleotide
  source 1..21: mol_type = other RNA
  modified_base 1: mod_base = OTHER; note = 2'-O-methyladenosine-3'- phosphorothioate
  modified_base 2: mod_base = OTHER; note = 2'-O-methyluridine-3'-phosphorothioate
  modified_base 3: mod_base = OTHER; note = 2'-O-methylguanosine-3'-phosphate
  modified_base 4: mod_base = OTHER; note = 2'-O-methylguanosine-3'-phosphate
  modified_base 5: mod_base = OTHER; note = 2'-O-methyladenosine-3'-phosphate
  modified_base 6: mod_base = OTHER; note = 2'-O-methyladenosine-3'-phosphate
  modified_base 7: mod_base = OTHER; note = 2'-fluorouridine-3'-phosphate
  modified_base 8: mod_base = OTHER; note = 2'-O-methylcytidine-3'-phosphate
  modified_base 9: mod_base = OTHER; note = 2'-fluorouridine-3'-phosphate
  modified_base 10: mod_base = OTHER; note = 2'-fluorocytidine-3'-phosphate
  modified_base 11: mod_base = OTHER; note = 2'-fluoroadenosine-3'-phosphate
  modified_base 12: mod_base = OTHER; note = 2'-O-methylguanosine-3'-phosphate
  modified_base 13: mod_base = OTHER; note = 2'-O-methyladenosine-3'-phosphate
  modified_base 14: mod_base = OTHER; note = 2'-O-methylcytidine-3'-phosphate
  modified_base 15: mod_base = OTHER; note = 2'-O-methylcytidine-3'-phosphate
  modified_base 16: mod_base = OTHER; note = 2'-O-methyluridine-3'-phosphate
  modified_base 17: mod_base = OTHER; note = 2'-O-methyluridine-3'-phosphate
  modified_base 18: mod_base = OTHER; note = 2'-O-methylguanosine-3'-phosphate
  modified_base 19: mod_base = OTHER; note = 2'-O-methyluridine-3'-phosphate
  modified_base 20: mod_base = OTHER; note = 2'-O-methylguanosine-3'-phosphate
  modified_base 21: mod_base = OTHER; note = 2'-O-methyladenosine-3'-phosphate attached to N-[tris(N-acetylgalactosamine-alkyl)-amidodecanoyl)]-4-hydr oxyprolinol Hyp-(N-acetylgalactosamine-alkyl)3
atggaatctcagaccttgtga

SEQ ID NO: 3762 - RNA, 21 nt, synthetic construct
  misc_feature 1..21: note = Description of Artificial Sequence: Synthetic oligonucleotide
  source 1..21: mol_type = other RNA
  modified_base 1: mod_base = OTHER; note = 2'-O-methylcytidine-3'- phosphorothioate
  modified_base 2: mod_base = OTHER; note = 2'-O-methyladenosine-3'- phosphorothioate
  modified_base 3: mod_base = OTHER; note = 2'-O-methylcytidine-3'-phosphate
  modified_base 4: mod_base = OTHER; note = 2'-O-methyladenosine-3'-phosphate
  modified_base 5: mod_base = OTHER; note = 2'-O-methylguanosine-3'-phosphate
  modified_base 6: mod_base = OTHER; note = 2'-O-methylcytidine-3'-phosphate
  modified_base 7: mod_base = OTHER; note = 2'-fluorouridine-3'-phosphate
  modified_base 8: mod_base = OTHER; note = 2'-O-methyladenosine-3'-phosphate
  modified_base 9: mod_base = OTHER; note = 2'-fluorouridine-3'-phosphate
  modified_base 10: mod_base = OTHER; note = 2'-fluoroadenosine-3'-phosphate
  modified_base 11: mod_base = OTHER; note = 2'-fluorouridine-3'-phosphate
  modified_base 12: mod_base = OTHER; note = 2'-O-methylcytidine-3'-phosphate
  modified_base 13: mod_base = OTHER; note = 2'-O-methylcytidine-3'-phosphate
  modified_base 14: mod_base = OTHER; note = 2'-O-methyluridine-3'-phosphate
  modified_base 15: mod_base = OTHER; note = 2'-O-methylguanosine-3'-phosphate
  modified_base 16: mod_base = OTHER; note = 2'-O-methyladenosine-3'-phosphate
  modified_base 17: mod_base = OTHER; note = 2'-O-methyluridine-3'-phosphate
  modified_base 18: mod_base = OTHER; note = 2'-O-methylguanosine-3'-phosphate
  modified_base 19: mod_base = OTHER; note = 2'-O-methylcytidine-3'-phosphate
  modified_base 20: mod_base = OTHER; note = 2'-O-methyluridine-3'-phosphate
  modified_base 21: mod_base = OTHER; note = 2'-O-methyladenosine-3'-phosphate attached to N-[tris(N-acetylgalactosamine-alkyl)-amidodecanoyl)]-4-hydr oxyprolinol Hyp-(N-acetylgalactosamine-alkyl)3
cacagctatatcctgatgcta

SEQ ID NO: 3763 - RNA, 21 nt, synthetic construct
  misc_feature 1..21: note = Description of Artificial Sequence: Synthetic oligonucleotide
  source 1..21: mol_type = other RNA
  modified_base 1: mod_base = OTHER; note = 2'-O-methylguanosine-3'- phosphorothioate
  modified_base 2: mod_base = OTHER; note = 2'-O-methyladenosine-3'- phosphorothioate
  modified_base 3: mod_base = OTHER; note = 2'-O-methylguanosine-3'-phosphate
  modified_base 4: mod_base = OTHER; note = 2'-O-methylguanosine-3'-phosphate
  modified_base 5: mod_base = OTHER; note = 2'-O-methyladenosine-3'-phosphate
  modified_base 6: mod_base = OTHER; note = 2'-O-methyladenosine-3'-phosphate
  modified_base 7: mod_base = OTHER; note = 2'-fluoroguanosine-3'-phosphate
  modified_base 8: mod_base = OTHER; note = 2'-O-methyladenosine-3'-phosphate
  modified_base 9: mod_base = OTHER; note = 2'-fluoroguanosine-3'-phosphate
  modified_base 10: mod_base = OTHER; note = 2'-fluoroguanosine-3'-phosphate
  modified_base 11: mod_base = OTHER; note = 2'-fluorocytidine-3'-phosphate
  modified_base 12: mod_base = OTHER; note = 2'-O-methylcytidine-3'-phosphate
  modified_base 13: mod_base = OTHER; note = 2'-O-methylcytidine-3'-phosphate
  modified_base 14: mod_base = OTHER; note = 2'-O-methylguanosine-3'-phosphate
  modified_base 15: mod_base = OTHER; note = 2'-O-methyluridine-3'-phosphate
  modified_base 16: mod_base = OTHER; note = 2'-O-methyluridine-3'-phosphate
  modified_base 17: mod_base = OTHER; note = 2'-O-methyluridine-3'-phosphate
  modified_base 18: mod_base = OTHER; note = 2'-O-methylguanosine-3'-phosphate
  modified_base 19: mod_base = OTHER; note = 2'-O-methyladenosine-3'-phosphate
  modified_base 20: mod_base = OTHER; note = 2'-O-methyladenosine-3'-phosphate
  modified_base 21: mod_base = OTHER; note = 2'-O-methyladenosine-3'-phosphate attached to N-[tris(N-acetylgalactosamine-alkyl)-amidodecanoyl)]-4-hydr oxyprolinol Hyp-(N-acetylgalactosamine-alkyl)3
gaggaagaggcccgtttgaaa

SEQ ID NO: 3764 - RNA, 21 nt, synthetic construct
  misc_feature 1..21: note = Description of Artificial Sequence: Synthetic oligonucleotide
  source 1..21: mol_type = other RNA
  modified_base 1: mod_base = OTHER; note = 2'-O-methyluridine-3'-phosphorothioate
  modified_base 2: mod_base = OTHER; note = 2'-O-methylcytidine-3'- phosphorothioate
  modified_base 3: mod_base = OTHER; note = 2'-O-methyluridine-3'-phosphate
  modified_base 4: mod_base = OTHER; note = 2'-O-methylguanosine-3'-phosphate
  modified_base 5: mod_base = OTHER; note = 2'-O-methyladenosine-3'-phosphate
  modified_base 6: mod_base = OTHER; note = 2'-O-methylguanosine-3'-phosphate
  modified_base 7: mod_base = OTHER; note = 2'-fluoroguanosine-3'-phosphate
  modified_base 8: mod_base = OTHER; note = 2'-O-methyladenosine-3'-phosphate
  modified_base 9: mod_base = OTHER; note = 2'-fluoroadenosine-3'-phosphate
  modified_base 10: mod_base = OTHER; note = 2'-fluoroguanosine-3'-phosphate
  modified_base 11: mod_base = OTHER; note = 2'-fluoroadenosine-3'-phosphate
  modified_base 12: mod_base = OTHER; note = 2'-O-methylguanosine-3'-phosphate
  modified_base 13: mod_base = OTHER; note = 2'-O-methylguanosine-3'-phosphate
  modified_base 14: mod_base = OTHER; note = 2'-O-methylcytidine-3'-phosphate
  modified_base 15: mod_base = OTHER; note = 2'-O-methylcytidine-3'-phosphate
  modified_base 16: mod_base = OTHER; note = 2'-O-methylcytidine-3'-phosphate
  modified_base 17: mod_base = OTHER; note = 2'-O-methylguanosine-3'-phosphate
  modified_base 18: mod_base = OTHER; note = 2'-O-methyluridine-3'-phosphate
  modified_base 19: mod_base = OTHER; note = 2'-O-methyluridine-3'-phosphate
  modified_base 20: mod_base = OTHER; note = 2'-O-methyluridine-3'-phosphate
  modified_base 21: mod_base = OTHER; note = 2'-O-methyladenosine-3'-phosphate attached to N-[tris(N-acetylgalactosamine-alkyl)-amidodecanoyl)]-4-hydr oxyprolinol Hyp-(N-acetylgalactosamine-alkyl)3
tctgaggaagaggcccgttta

SEQ ID NO: 3765 - RNA, 21 nt, synthetic construct
  misc_feature 1..21: note = Description of Artificial Sequence: Synthetic oligonucleotide
  source 1..21: mol_type = other RNA
  modified_base 1: mod_base = OTHER; note = 2'-O-methylcytidine-3'- phosphorothioate
  modified_base 2: mod_base = OTHER; note = 2'-O-methyladenosine-3'- phosphorothioate
  modified_base 3: mod_base = OTHER; note = 2'-O-methylcytidine-3'-phosphate
  modified_base 4: mod_base = OTHER; note = 2'-O-methyladenosine-3'-phosphate
  modified_base 5: mod_base = OTHER; note = 2'-O-methyluridine-3'-phosphate
  modified_base 6: mod_base = OTHER; note = 2'-O-methylcytidine-3'-phosphate
  modified_base 7: mod_base = OTHER; note = 2'-fluorocytidine-3'-phosphate
  modified_base 8: mod_base = OTHER; note = 2'-O-methyluridine-3'-phosphate
  modified_base 9: mod_base = OTHER; note = 2'-fluoroguanosine-3'-phosphate
  modified_base 10: mod_base = OTHER; note = 2'-fluoroguanosine-3'-phosphate
  modified_base 11: mod_base = OTHER; note = 2'-fluoroguanosine-3'-phosphate
  modified_base 12: mod_base = OTHER; note = 2'-O-methyladenosine-3'-phosphate
  modified_base 13: mod_base = OTHER; note = 2'-O-methyluridine-3'-phosphate
  modified_base 14: mod_base = OTHER; note = 2'-O-methylcytidine-3'-phosphate
  modified_base 15: mod_base = OTHER; note = 2'-O-methylcytidine-3'-phosphate
  modified_base 16: mod_base = OTHER; note = 2'-O-methyladenosine-3'-phosphate
  modified_base 17: mod_base = OTHER; note = 2'-O-methylguanosine-3'-phosphate
  modified_base 18: mod_base = OTHER; note = 2'-O-methyluridine-3'-phosphate
  modified_base 19: mod_base = OTHER; note = 2'-O-methylguanosine-3'-phosphate
  modified_base 20: mod_base = OTHER; note = 2'-O-methyluridine-3'-phosphate
  modified_base 21: mod_base = OTHER; note = 2'-O-methyladenosine-3'-phosphate attached to N-[tris(N-acetylgalactosamine-alkyl)-amidodecanoyl)]-4-hydr oxyprolinol Hyp-(N-acetylgalactosamine-alkyl)3
cacatcctgggatccagtgta

SEQ ID NO: 3766 - RNA, 21 nt, synthetic construct
  misc_feature 1..21: note = Description of Artificial Sequence: Synthetic oligonucleotide
  source 1..21: mol_type = other RNA
  modified_base 1: mod_base = OTHER; note = 2'-O-methyladenosine-3'- phosphorothioate
  modified_base 2: mod_base = OTHER; note = 2'-O-methylguanosine-3'- phosphorothioate
  modified_base 3: mod_base = OTHER; note = 2'-O-methylcytidine-3'-phosphate
  modified_base 4: mod_base = OTHER; note = 2'-O-methylcytidine-3'-phosphate
  modified_base 5: mod_base = OTHER; note = 2'-O-methyluridine-3'-phosphate
  modified_base 6: mod_base = OTHER; note = 2'-O-methyluridine-3'-phosphate
  modified_base 7: mod_base = OTHER; note = 2'-fluorouridine-3'-phosphate
  modified_base 8: mod_base = OTHER; note = 2'-O-methyluridine-3'-phosphate
  modified_base 9: mod_base = OTHER; note = 2'-fluorocytidine-3'-phosphate
  modified_base 10: mod_base = OTHER; note = 2'-fluorocytidine-3'-phosphate
  modified_base 11: mod_base = OTHER; note = 2'-fluorouridine-3'-phosphate
  modified_base 12: mod_base = OTHER; note = 2'-O-methyluridine-3'-phosphate
  modified_base 13: mod_base = OTHER; note = 2'-O-methyladenosine-3'-phosphate
  modified_base 14: mod_base = OTHER; note = 2'-O-methylguanosine-3'-phosphate
  modified_base 15: mod_base = OTHER; note = 2'-O-methyladenosine-3'-phosphate
  modified_base 16: mod_base = OTHER; note = 2'-O-methyladenosine-3'-phosphate
  modified_base 17: mod_base = OTHER; note = 2'-O-methylcytidine-3'-phosphate
  modified_base 18: mod_base = OTHER; note = 2'-O-methyladenosine-3'-phosphate
  modified_base 19: mod_base = OTHER; note = 2'-O-methylcytidine-3'-phosphate
  modified_base 20: mod_base = OTHER; note = 2'-O-methylcytidine-3'-phosphate
  modified_base 21: mod_base = OTHER; note = 2'-O-methyladenosine-3'-phosphate attached to N-[tris(N-acetylgalactosamine-alkyl)-amidodecanoyl)]-4-hydr oxyprolinol Hyp-(N-acetylgalactosamine-alkyl)3
agccttttccttagaacacca

SEQ ID NO: 3767 - RNA, 21 nt, synthetic construct
  misc_feature 1..21: note = Description of Artificial Sequence: Synthetic oligonucleotide
  source 1..21: mol_type = other RNA
  modified_base 1: mod_base = OTHER; note = 2'-O-methyluridine-3'-phosphorothioate
  modified_base 2: mod_base = OTHER; note = 2'-O-methylcytidine-3'- phosphorothioate
  modified_base 3: mod_base = OTHER; note = 2'-O-methyladenosine-3'-phosphate
  modified_base 4: mod_base = OTHER; note = 2'-O-methyladenosine-3'-phosphate
  modified_base 5: mod_base = OTHER; note = 2'-O-methylcytidine-3'-phosphate
  modified_base 6: mod_base = OTHER; note = 2'-O-methyluridine-3'-phosphate
  modified_base 7: mod_base = OTHER; note = 2'-fluoroguanosine-3'-phosphate
  modified_base 8: mod_base = OTHER; note = 2'-O-methylguanosine-3'-phosphate
  modified_base 9: mod_base = OTHER; note = 2'-fluorouridine-3'-phosphate
  modified_base 10: mod_base = OTHER; note = 2'-fluorouridine-3'-phosphate
  modified_base 11: mod_base = OTHER; note = 2'-fluoroadenosine-3'-phosphate
  modified_base 12: mod_base = OTHER; note = 2'-O-methylguanosine-3'-phosphate
  modified_base 13: mod_base = OTHER; note = 2'-O-methyluridine-3'-phosphate
  modified_base 14: mod_base = OTHER; note = 2'-O-methylguanosine-3'-phosphate
  modified_base 15: mod_base = OTHER; note = 2'-O-methyluridine-3'-phosphate
  modified_base 16: mod_base = OTHER; note = 2'-O-methylguanosine-3'-phosphate
  modified_base 17: mod_base = OTHER; note = 2'-O-methyladenosine-3'-phosphate
  modified_base 18: mod_base = OTHER; note = 2'-O-methyladenosine-3'-phosphate
  modified_base 19: mod_base = OTHER; note = 2'-O-methyladenosine-3'-phosphate
  modified_base 20: mod_base = OTHER; note = 2'-O-methyluridine-3'-phosphate
  modified_base 21: mod_base = OTHER; note = 2'-O-methyladenosine-3'-phosphate attached to N-[tris(N-acetylgalactosamine-alkyl)-amidodecanoyl)]-4-hydr oxyprolinol Hyp-(N-acetylgalactosamine-alkyl)3
tcaactggttagtgtgaaata

SEQ ID NO: 3768 - RNA, 23 nt, synthetic construct
  misc_feature 1..23: note = Description of Artificial Sequence: Synthetic oligonucleotide
  source 1..23: mol_type = other RNA
  modified_base 1: mod_base = OTHER; note = 2'-O-methyluridine-3'-phosphorothioate
  modified_base 2: mod_base = OTHER; note = 2'-fluorouridine -3'-phosphorothioate
  modified_base 3: mod_base = OTHER; note = 2'-O-methyluridine-3'-phosphate
  modified_base 4: mod_base = OTHER; note = 2'-O-methyladenosine-3'-phosphate
  modified_base 5: mod_base = OTHER; note = 2'-O-methyladenosine-3'-phosphate
  modified_base 6: mod_base = OTHER; note = 2'-fluorouridine-3'-phosphate
  modified_base 7: mod_base = OTHER; note = 2'-O-methylcytidine-3'-phosphate
  modified_base 8: mod_base = OTHER; note = 2'-fluoroadenosine-3'-phosphate
  modified_base 9: mod_base = OTHER; note = 2'-fluorocytidine-3'-phosphate
  modified_base 10: mod_base = OTHER; note = 2'-O-methyladenosine-3'-phosphate
  modified_base 11: mod_base = OTHER; note = 2'-O-methylguanosine-3'-phosphate
  modified_base 12: mod_base = OTHER; note = 2'-O-methyladenosine-3'-phosphate
  modified_base 13: mod_base = OTHER; note = 2'-O-methyluridine-3'-phosphate
  modified_base 14: mod_base = OTHER; note = 2'-fluorocytidine-3'-phosphate
  modified_base 15: mod_base = OTHER; note = 2'-O-methyladenosine-3'-phosphate
  modified_base 16: mod_base = OTHER; note = 2'-fluoroguanosine-3'-phosphate
  modified_base 17: mod_base = OTHER; note = 2'-O-methyladenosine-3'-phosphate
  modified_base 18: mod_base = OTHER; note = 2'-O-methyluridine-3'-phosphate
  modified_base 19: mod_base = OTHER; note = 2'-O-methyladenosine-3'-phosphate
  modified_base 20: mod_base = OTHER; note = 2'-O-methyladenosine-3'-phosphate
  modified_base 21: mod_base = OTHER; note = 2'-O-methyladenosine-3'- phosphorothioate
  modified_base 22: mod_base = OTHER; note = 2'-O-methyladenosine-3'- phosphorothioate
  modified_base 23: mod_base = OTHER; note = 2'-O-methyladenosine-3'-phosphate
tttaatcacagatcagataaaaa

SEQ ID NO: 3769 - RNA, 23 nt, synthetic construct
  misc_feature 1..23: note = Description of Artificial Sequence: Synthetic oligonucleotide
  source 1..23: mol_type = other RNA
  modified_base 1: mod_base = OTHER; note = 2'-O-methyladenosine-3'- phosphorothioate
  modified_base 2: mod_base = OTHER; note = 2'-fluoroadenosine-3'-phosphorothioate
  modified_base 3: mod_base = OTHER; note = 2'-O-methylcytidine-3'-phosphate
  modified_base 4: mod_base = OTHER; note = 2'-O-methyluridine-3'-phosphate
  modified_base 5: mod_base = OTHER; note = 2'-O-methyladenosine-3'-phosphate
  modified_base 6: mod_base = OTHER; note = 2'-fluorouridine-3'-phosphate
  modified_base 7: mod_base = OTHER; note = 2'-O-methyluridine-3'-phosphate
  modified_base 8: mod_base = OTHER; note = 2'-fluorouridine-3'-phosphate
  modified_base 9: mod_base = OTHER; note = 2'-fluorocytidine-3'-phosphate
  modified_base 10: mod_base = OTHER; note = 2'-O-methyladenosine-3'-phosphate
  modified_base 11: mod_base = OTHER; note = 2'-O-methylcytidine-3'-phosphate
  modified_base 12: mod_base = OTHER; note = 2'-O-methyladenosine-3'-phosphate
  modified_base 13: mod_base = OTHER; note = 2'-O-methylcytidine-3'-phosphate
  modified_base 14: mod_base = OTHER; note = 2'-fluorouridine-3'-phosphate
  modified_base 15: mod_base = OTHER; note = 2'-O-methyladenosine-3'-phosphate
  modified_base 16: mod_base = OTHER; note = 2'-fluoroadenosine-3'-phosphate
  modified_base 17: mod_base = OTHER; note = 2'-O-methylcytidine-3'-phosphate
  modified_base 18: mod_base = OTHER; note = 2'-O-methylcytidine-3'-phosphate
  modified_base 19: mod_base = OTHER; note = 2'-O-methyladenosine-3'-phosphate
  modified_base 20: mod_base = OTHER; note = 2'-O-methylguanosine-3'-phosphate
  modified_base 21: mod_base = OTHER; note = 2'-O-methyluridine-3'-phosphorothioate
  modified_base 22: mod_base = OTHER; note = 2'-O-methyluridine-3'-phosphorothioate
  modified_base 23: mod_base = OTHER; note = 2'-O-methylguanosine-3'-phosphate
aactatttcacactaaccagttg

SEQ ID NO: 3770 - RNA, 23 nt, synthetic construct
  misc_feature 1..23: note = Description of Artificial Sequence: Synthetic oligonucleotide
  source 1..23: mol_type = other RNA
  modified_base 1: mod_base = OTHER; note = 2'-O-methyladenosine-3'- phosphorothioate
  modified_base 2: mod_base = OTHER; note = 2'-fluoroadenosine-3'-phosphorothioate
  modified_base 3: mod_base = OTHER; note = 2'-O-methyladenosine-3'-phosphate
  modified_base 4: mod_base = OTHER; note = 2'-O-methyluridine-3'-phosphate
  modified_base 5: mod_base = OTHER; note = 2'-O-methylguanosine-3'-phosphate
  modified_base 6: mod_base = OTHER; note = 2'-fluorouridine-3'-phosphate
  modified_base 7: mod_base = OTHER; note = 2'-O-methyluridine-3'-phosphate
  modified_base 8: mod_base = OTHER; note = 2'-fluoroguanosine-3'-phosphate
  modified_base 9: mod_base = OTHER; note = 2'-fluoroguanosine-3'-phosphate
  modified_base 10: mod_base = OTHER; note = 2'-O-methyladenosine-3'-phosphate
  modified_base 11: mod_base = OTHER; note = 2'-O-methylcytidine-3'-phosphate
  modified_base 12: mod_base = OTHER; note = 2'-O-methyluridine-3'-phosphate
  modified_base 13: mod_base = OTHER; note = 2'-O-methyladenosine-3'-phosphate
  modified_base 14: mod_base = OTHER; note = 2'-fluoroguanosine-3'-phosphate
  modified_base 15: mod_base = OTHER; note = 2'-O-methylguanosine-3'-phosphate
  modified_base 16: mod_base = OTHER; note = 2'-fluorocytidine-3'-phosphate
  modified_base 17: mod_base = OTHER; note = 2'-O-methyladenosine-3'-phosphate
  modified_base 18: mod_base = OTHER; note = 2'-O-methyluridine-3'-phosphate
  modified_base 19: mod_base = OTHER; note = 2'-O-methylguanosine-3'-phosphate
  modified_base 20: mod_base = OTHER; note = 2'-O-methyluridine-3'-phosphate
  modified_base 21: mod_base = OTHER; note = 2'-O-methyluridine-3'-phosphorothioate
  modified_base 22: mod_base = OTHER; note = 2'-O-methylcytidine-3'- phosphorothioate
  modified_base 23: mod_base = OTHER; note = 2'-O-methyladenosine-3'-phosphate
aaatgttggactaggcatgttca

SEQ ID NO: 3771 - RNA, 23 nt, synthetic construct
  misc_feature 1..23: note = Description of Artificial Sequence: Synthetic oligonucleotide
  source 1..23: mol_type = other RNA
  modified_base 1: mod_base = OTHER; note = 2'-O-methyladenosine-3'- phosphorothioate
  modified_base 2: mod_base = OTHER; note = 2'-fluoroguanosine-3'-phosphorothioate
  modified_base 3: mod_base = OTHER; note = 2'-O-methyladenosine-3'-phosphate
  modified_base 4: mod_base = OTHER; note = 2'-O-methylguanosine-3'-phosphate
  modified_base 5: mod_base = OTHER; note = 2'-O-methyluridine-3'-phosphate
  modified_base 6: mod_base = OTHER; note = 2'-fluorouridine-3'-phosphate
  modified_base 7: mod_base = OTHER; note = 2'-O-methylguanosine-3'-phosphate
  modified_base 8: mod_base = OTHER; note = 2'-fluorocytidine-3'-phosphate
  modified_base 9: mod_base = OTHER; note = 2'-fluorocytidine-3'-phosphate
  modified_base 10: mod_base = OTHER; note = 2'-O-methyladenosine-3'-phosphate
  modified_base 11: mod_base = OTHER; note = 2'-O-methyluridine-3'-phosphate
  modified_base 12: mod_base = OTHER; note = 2'-O-methyladenosine-3'-phosphate
  modified_base 13: mod_base = OTHER; note = 2'-O-methyluridine-3'-phosphate
  modified_base 14: mod_base = OTHER; note = 2'-fluorouridine-3'-phosphate
  modified_base 15: mod_base = OTHER; note = 2'-O-methylguanosine-3'-phosphate
  modified_base 16: mod_base = OTHER; note = 2'-fluoroguanosine-3'-phosphate
  modified_base 17: mod_base = OTHER; note = 2'-O-methyladenosine-3'-phosphate
  modified_base 18: mod_base = OTHER; note = 2'-O-methylcytidine-3'-phosphate
  modified_base 19: mod_base = OTHER; note = 2'-O-methyluridine-3'-phosphate
  modified_base 20: mod_base = OTHER; note = 2'-O-methyluridine-3'-phosphate
  modified_base 21: mod_base = OTHER; note = 2'-O-methylguanosine-3'- phosphorothioate
  modified_base 22: mod_base = OTHER; note = 2'-O-methylguanosine-3'- phosphorothioate
  modified_base 23: mod_base = OTHER; note = 2'-O-methyladenosine-3'-phosphate
agagttgccatattggacttgga

SEQ ID NO: 3772 - RNA, 23 nt, synthetic construct
  misc_feature 1..23: note = Description of Artificial Sequence: Synthetic oligonucleotide
  source 1..23: mol_type = other RNA
  modified_base 1: mod_base = OTHER; note = 2'-O-methyladenosine-3'- phosphorothioate
  modified_base 2: mod_base = OTHER; note = 2'-fluoroadenosine-3'-phosphorothioate
  modified_base 3: mod_base = OTHER; note = 2'-O-methylguanosine-3'-phosphate
  modified_base 4: mod_base = OTHER; note = 2'-O-methyladenosine-3'-phosphate
  modified_base 5: mod_base = OTHER; note = 2'-O-methylcytidine-3'-phosphate
  modified_base 6: mod_base = OTHER; note = 2'-fluorocytidine-3'-phosphate
  modified_base 7: mod_base = OTHER; note = 2'-O-methylcytidine-3'-phosphate
  modified_base 8: mod_base = OTHER; note = 2'-fluorouridine-3'-phosphate
  modified_base 9: mod_base = OTHER; note = 2'-fluorouridine-3'-phosphate
  modified_base 10: mod_base = OTHER; note = 2'-O-methyladenosine-3'-phosphate
  modified_base 11: mod_base = OTHER; note = 2'-O-methyladenosine-3'-phosphate
  modified_base 12: mod_base = OTHER; note = 2'-O-methyluridine-3'-phosphate
  modified_base 13: mod_base = OTHER; note = 2'-O-methylcytidine-3'-phosphate
  modified_base 14: mod_base = OTHER; note = 2'-fluoroadenosine-3'-phosphate
  modified_base 15: mod_base = OTHER; note = 2'-O-methyluridine-3'-phosphate
  modified_base 16: mod_base = OTHER; note = 2'-fluoroguanosine-3'-phosphate
  modified_base 17: mod_base = OTHER; note = 2'-O-methylguanosine-3'-phosphate
  modified_base 18: mod_base = OTHER; note = 2'-O-methyluridine-3'-phosphate
  modified_base 19: mod_base = OTHER; note = 2'-O-methylguanosine-3'-phosphate
  modified_base 20: mod_base = OTHER; note = 2'-O-methylguanosine-3'-phosphate
  modified_base 21: mod_base = OTHER; note = 2'-O-methyladenosine-3'- phosphorothioate
  modified_base 22: mod_base = OTHER; note = 2'-O-methyladenosine-3'- phosphorothioate
  modified_base 23: mod_base = OTHER; note = 2'-O-methyladenosine-3'-phosphate
aagacccttaatcatggtggaaa

SEQ ID NO: 3773 - RNA, 23 nt, synthetic construct
  misc_feature 1..23: note = Description of Artificial Sequence: Synthetic oligonucleotide
  source 1..23: mol_type = other RNA
  modified_base 1: mod_base = OTHER; note = 2'-O-methyluridine-3'-phosphorothioate
  modified_base 2: mod_base = OTHER; note = 2'-fluorouridine -3'-phosphorothioate
  modified_base 3: mod_base = OTHER; note = 2'-O-methyladenosine-3'-phosphate
  modified_base 4: mod_base = OTHER; note = 2'-O-methylguanosine-3'-phosphate
  modified_base 5: mod_base = OTHER; note = 2'-O-methylcytidine-3'-phosphate
  modified_base 6: mod_base = OTHER; note = 2'-fluorocytidine-3'-phosphate
  modified_base 7: mod_base = OTHER; note = 2'-O-methyluridine-3'-phosphate
  modified_base 8: mod_base = OTHER; note = 2'-fluoroadenosine-3'-phosphate
  modified_base 9: mod_base = OTHER; note = 2'-fluoroguanosine-3'-phosphate
  modified_base 10: mod_base = OTHER; note = 2'-O-methyladenosine-3'-phosphate
  modified_base 11: mod_base = OTHER; note = 2'-O-methylcytidine-3'-phosphate
  modified_base 12: mod_base = OTHER; note = 2'-O-methyladenosine-3'-phosphate
  modified_base 13: mod_base = OTHER; note = 2'-O-methylguanosine-3'-phosphate
  modified_base 14: mod_base = OTHER; note = 2'-fluorouridine-3'-phosphate
  modified_base 15: mod_base = OTHER; note = 2'-O-methylguanosine-3'-phosphate
  modified_base 16: mod_base = OTHER; note = 2'-fluoroadenosine-3'-phosphate
  modified_base 17: mod_base = OTHER; note = 2'-O-methyladenosine-3'-phosphate
  modified_base 18: mod_base = OTHER; note = 2'-O-methyladenosine-3'-phosphate
  modified_base 19: mod_base = OTHER; note = 2'-O-methyluridine-3'-phosphate
  modified_base 20: mod_base = OTHER; note = 2'-O-methylguanosine-3'-phosphate
  modified_base 21: mod_base = OTHER; note = 2'-O-methyladenosine-3'- phosphorothioate
  modified_base 22: mod_base = OTHER; note = 2'-O-methyluridine-3'-phosphorothioate
  modified_base 23: mod_base = OTHER; note = 2'-O-methyladenosine-3'-phosphate
ttagcctagacagtgaaatgata

SEQ ID NO: 3774 - RNA, 23 nt, synthetic construct
  misc_feature 1..23: note = Description of Artificial Sequence: Synthetic oligonucleotide
  source 1..23: mol_type = other RNA
  modified_base 1: mod_base = OTHER; note = 2'-O-methyladenosine-3'- phosphorothioate
  modified_base 2: mod_base = OTHER; note = 2'-fluorocytidine-3'-phosphorothioate
  modified_base 3: mod_base = OTHER; note = 2'-O-methyladenosine-3'-phosphate
  modified_base 4: mod_base = OTHER; note = 2'-O-methylguanosine-3'-phosphate
  modified_base 5: mod_base = OTHER; note = 2'-O-methyladenosine-3'-phosphate
  modified_base 6: mod_base = OTHER; note = 2'-fluorouridine-3'-phosphate
  modified_base 7: mod_base = OTHER; note = 2'-O-methylcytidine-3'-phosphate
  modified_base 8: mod_base = OTHER; note = 2'-fluoroadenosine-3'-phosphate
  modified_base 9: mod_base = OTHER; note = 2'-fluoroguanosine-3'-phosphate
  modified_base 10: mod_base = OTHER; note = 2'-O-methyladenosine-3'-phosphate
  modified_base 11: mod_base = OTHER; note = 2'-O-methyluridine-3'-phosphate
  modified_base 12: mod_base = OTHER; note = 2'-O-methyladenosine-3'-phosphate
  modified_base 13: mod_base = OTHER; note = 2'-O-methyladenosine-3'-phosphate
  modified_base 14: mod_base = OTHER; note = 2'-fluoroadenosine-3'-phosphate
  modified_base 15: mod_base = OTHER; note = 2'-O-methyladenosine-3'-phosphate
  modified_base 16: mod_base = OTHER; note = 2'-fluoroadenosine-3'-phosphate
  modified_base 17: mod_base = OTHER; note = 2'-O-methylguanosine-3'-phosphate
  modified_base 18: mod_base = OTHER; note = 2'-O-methylguanosine-3'-phosphate
  modified_base 19: mod_base = OTHER; note = 2'-O-methyladenosine-3'-phosphate
  modified_base 20: mod_base = OTHER; note = 2'-O-methylcytidine-3'-phosphate
  modified_base 21: mod_base = OTHER; note = 2'-O-methyladenosine-3'- phosphorothioate
  modified_base 22: mod_base = OTHER; note = 2'-O-methyladenosine-3'- phosphorothioate
  modified_base 23: mod_base = OTHER; note = 2'-O-methylcytidine-3'-phosphate
acagatcagataaaaaggacaac

SEQ ID NO: 3775 - RNA, 23 nt, synthetic construct
  misc_feature 1..23: note = Description of Artificial Sequence: Synthetic oligonucleotide
  source 1..23: mol_type = other RNA
  modified_base 1: mod_base = OTHER; note = 2'-O-methyluridine-3'-phosphorothioate
  modified_base 2: mod_base = OTHER; note = 2'-fluoroadenosine-3'-phosphorothioate
  modified_base 3: mod_base = OTHER; note = 2'-O-methyluridine-3'-phosphate
  modified_base 4: mod_base = OTHER; note = 2'-O-methyladenosine-3'-phosphate
  modified_base 5: mod_base = OTHER; note = 2'-O-methyluridine-3'-phosphate
  modified_base 6: mod_base = OTHER; note = 2'-fluorouridine-3'-phosphate
  modified_base 7: mod_base = OTHER; note = 2'-O-methylguanosine-3'-phosphate
  modified_base 8: mod_base = OTHER; note = 2'-fluoroguanosine-3'-phosphate
  modified_base 9: mod_base = OTHER; note = 2'-fluoroadenosine-3'-phosphate
  modified_base 10: mod_base = OTHER; note = 2'-O-methyluridine-3'-phosphate
  modified_base 11: mod_base = OTHER; note = 2'-O-methyluridine-3'-phosphate
  modified_base 12: mod_base = OTHER; note = 2'-O-methyluridine-3'-phosphate
  modified_base 13: mod_base = OTHER; note = 2'-O-methyladenosine-3'-phosphate
  modified_base 14: mod_base = OTHER; note = 2'-fluorouridine-3'-phosphate
  modified_base 15: mod_base = OTHER; note = 2'-O-methyladenosine-3'-phosphate
  modified_base 16: mod_base = OTHER; note = 2'-fluorocytidine-3'-phosphate
  modified_base 17: mod_base = OTHER; note = 2'-O-methyladenosine-3'-phosphate
  modified_base 18: mod_base = OTHER; note = 2'-O-methylcytidine-3'-phosphate
  modified_base 19: mod_base = OTHER; note = 2'-O-methyluridine-3'-phosphate
  modified_base 20: mod_base = OTHER; note = 2'-O-methylguanosine-3'-phosphate
  modified_base 21: mod_base = OTHER; note = 2'-O-methylguanosine-3'- phosphorothioate
  modified_base 22: mod_base = OTHER; note = 2'-O-methyladenosine-3'- phosphorothioate
  modified_base 23: mod_base = OTHER; note = 2'-O-methyluridine-3'-phosphate
tatattggatttatacactggat

SEQ ID NO: 3776 - RNA, 23 nt, synthetic construct
  misc_feature 1..23: note = Description of Artificial Sequence: Synthetic oligonucleotide
  source 1..23: mol_type = other RNA
  modified_base 1: mod_base = OTHER; note = 2'-O-methyluridine-3'-phosphorothioate
  modified_base 2: mod_base = OTHER; note = 2'-fluorouridine -3'-phosphorothioate
  modified_base 3: mod_base = OTHER; note = 2'-O-methyladenosine-3'-phosphate
  modified_base 4: mod_base = OTHER; note = 2'-O-methylguanosine-3'-phosphate
  modified_base 5: mod_base = OTHER; note = 2'-O-methyluridine-3'-phosphate
  modified_base 6: mod_base = OTHER; note = 2'-fluorouridine-3'-phosphate
  modified_base 7: mod_base = OTHER; note = 2'-O-methylguanosine-3'-phosphate
  modified_base 8: mod_base = OTHER; note = 2'-fluoroguanosine-3'-phosphate
  modified_base 9: mod_base = OTHER; note = 2'-fluorouridine-3'-phosphate
  modified_base 10: mod_base = OTHER; note = 2'-O-methyladenosine-3'-phosphate
  modified_base 11: mod_base = OTHER; note = 2'-O-methyluridine-3'-phosphate
  modified_base 12: mod_base = OTHER; note = 2'-O-methyladenosine-3'-phosphate
  modified_base 13: mod_base = OTHER; note = 2'-O-methyladenosine-3'-phosphate
  modified_base 14: mod_base = OTHER; note = 2'-fluorocytidine-3'-phosphate
  modified_base 15: mod_base = OTHER; note = 2'-O-methyladenosine-3'-phosphate
  modified_base 16: mod_base = OTHER; note = 2'-fluorocytidine-3'-phosphate
  modified_base 17: mod_base = OTHER; note = 2'-O-methyluridine-3'-phosphate
  modified_base 18: mod_base = OTHER; note = 2'-O-methyluridine-3'-phosphate
  modified_base 19: mod_base = OTHER; note = 2'-O-methylguanosine-3'-phosphate
  modified_base 20: mod_base = OTHER; note = 2'-O-methylguanosine-3'-phosphate
  modified_base 21: mod_base = OTHER; note = 2'-O-methyladenosine-3'- phosphorothioate
  modified_base 22: mod_base = OTHER; note = 2'-O-methyluridine-3'-phosphorothioate
  modified_base 23: mod_base = OTHER; note = 2'-O-methyladenosine-3'-phosphate
ttagttggtataacacttggata

SEQ ID NO: 3777 - RNA, 23 nt, synthetic construct
  misc_feature 1..23: note = Description of Artificial Sequence: Synthetic oligonucleotide
  source 1..23: mol_type = other RNA
  modified_base 1: mod_base = OTHER; note = 2'-O-methyluridine-3'-phosphorothioate
  modified_base 2: mod_base = OTHER; note = 2'-fluorouridine -3'-phosphorothioate
  modified_base 3: mod_base = OTHER; note = 2'-O-methyluridine-3'-phosphate
  modified_base 4: mod_base = OTHER; note = 2'-O-methylcytidine-3'-phosphate
  modified_base 5: mod_base = OTHER; note = 2'-O-methyladenosine-3'-phosphate
  modified_base 6: mod_base = OTHER; note = 2'-fluoroadenosine-3'-phosphate
  modified_base 7: mod_base = OTHER; note = 2'-O-methyluridine-3'-phosphate
  modified_base 8: mod_base = OTHER; note = 2'-fluorouridine-3'-phosphate
  modified_base 9: mod_base = OTHER; note = 2'-fluorouridine-3'-phosphate
  modified_base 10: mod_base = OTHER; note = 2'-O-methylguanosine-3'-phosphate
  modified_base 11: mod_base = OTHER; note = 2'-O-methyluridine-3'-phosphate
  modified_base 12: mod_base = OTHER; note = 2'-O-methylcytidine-3'-phosphate
  modified_base 13: mod_base = OTHER; note = 2'-O-methyluridine-3'-phosphate
  modified_base 14: mod_base = OTHER; note = 2'-fluorouridine-3'-phosphate
  modified_base 15: mod_base = OTHER; note = 2'-O-methylcytidine-3'-phosphate
  modified_base 16: mod_base = OTHER; note = 2'-fluoroguanosine-3'-phosphate
  modified_base 17: mod_base = OTHER; note = 2'-O-methyladenosine-3'-phosphate
  modified_base 18: mod_base = OTHER; note = 2'-O-methyluridine-3'-phosphate
  modified_base 19: mod_base = OTHER; note = 2'-O-methylguanosine-3'-phosphate
  modified_base 20: mod_base = OTHER; note = 2'-O-methyladenosine-3'-phosphate
  modified_base 21: mod_base = OTHER; note = 2'-O-methylcytidine-3'- phosphorothioate
  modified_base 22: mod_base = OTHER; note = 2'-O-methyladenosine-3'- phosphorothioate
  modified_base 23: mod_base = OTHER; note = 2'-O-methyluridine-3'-phosphate
tttcaatttgtcttcgatgacat

SEQ ID NO: 3778 - RNA, 23 nt, synthetic construct
  misc_feature 1..23: note = Description of Artificial Sequence: Synthetic oligonucleotide
  source 1..23: mol_type = other RNA
  modified_base 1: mod_base = OTHER; note = 2'-O-methyluridine-3'-phosphorothioate
  modified_base 2: mod_base = OTHER; note = 2'-fluoroadenosine-3'-phosphorothioate
  modified_base 3: mod_base = OTHER; note = 2'-O-methylguanosine-3'-phosphate
  modified_base 4: mod_base = OTHER; note = 2'-O-methyladenosine-3'-phosphate
  modified_base 5: mod_base = OTHER; note = 2'-O-methylguanosine-3'-phosphate
  modified_base 6: mod_base = OTHER; note = 2'-fluoroadenosine-3'-phosphate
  modified_base 7: mod_base = OTHER; note = 2'-O-methylcytidine-3'-phosphate
  modified_base 8: mod_base = OTHER; note = 2'-fluoroadenosine-3'-phosphate
  modified_base 9: mod_base = OTHER; note = 2'-fluoroadenosine-3'-phosphate
  modified_base 10: mod_base = OTHER; note = 2'-O-methyluridine-3'-phosphate
  modified_base 11: mod_base = OTHER; note = 2'-O-methylcytidine-3'-phosphate
  modified_base 12: mod_base = OTHER; note = 2'-O-methyluridine-3'-phosphate
  modified_base 13: mod_base = OTHER; note = 2'-O-methyluridine-3'-phosphate
  modified_base 14: mod_base = OTHER; note = 2'-fluorouridine-3'-phosphate
  modified_base 15: mod_base = OTHER; note = 2'-O-methylguanosine-3'-phosphate
  modified_base 16: mod_base = OTHER; note = 2'-fluoroguanosine-3'-phosphate
  modified_base 17: mod_base = OTHER; note = 2'-O-methyluridine-3'-phosphate
  modified_base 18: mod_base = OTHER; note = 2'-O-methylguanosine-3'-phosphate
  modified_base 19: mod_base = OTHER; note = 2'-O-methyluridine-3'-phosphate
  modified_base 20: mod_base = OTHER; note = 2'-O-methyluridine-3'-phosphate
  modified_base 21: mod_base = OTHER; note = 2'-O-methylcytidine-3'- phosphorothioate
  modified_base 22: mod_base = OTHER; note = 2'-O-methyluridine-3'-phosphorothioate
  modified_base 23: mod_base = OTHER; note = 2'-O-methyladenosine-3'-phosphate
tagagacaatctttggtgttcta

SEQ ID NO: 3779 - RNA, 23 nt, synthetic construct
  misc_feature 1..23: note = Description of Artificial Sequence: Synthetic oligonucleotide
  source 1..23: mol_type = other RNA
  modified_base 1: mod_base = OTHER; note = 2'-O-methyluridine-3'-phosphorothioate
  modified_base 2: mod_base = OTHER; note = 2'-fluorocytidine-3'-phosphorothioate
  modified_base 3: mod_base = OTHER; note = 2'-O-methyladenosine-3'-phosphate
  modified_base 4: mod_base = OTHER; note = 2'-O-methylguanosine-3'-phosphate
  modified_base 5: mod_base = OTHER; note = 2'-O-methyladenosine-3'-phosphate
  modified_base 6: mod_base = OTHER; note = 2'-fluoroguanosine-3'-phosphate
  modified_base 7: mod_base = OTHER; note = 2'-O-methyladenosine-3'-phosphate
  modified_base 8: mod_base = OTHER; note = 2'-fluorocytidine-3'-phosphate
  modified_base 9: mod_base = OTHER; note = 2'-fluoroadenosine-3'-phosphate
  modified_base 10: mod_base = OTHER; note = 2'-O-methyladenosine-3'-phosphate
  modified_base 11: mod_base = OTHER; note = 2'-O-methyluridine-3'-phosphate
  modified_base 12: mod_base = OTHER; note = 2'-O-methylcytidine-3'-phosphate
  modified_base 13: mod_base = OTHER; note = 2'-O-methyluridine-3'-phosphate
  modified_base 14: mod_base = OTHER; note = 2'-fluorouridine-3'-phosphate
  modified_base 15: mod_base = OTHER; note = 2'-O-methyluridine-3'-phosphate
  modified_base 16: mod_base = OTHER; note = 2'-fluoroguanosine-3'-phosphate
  modified_base 17: mod_base = OTHER; note = 2'-O-methylguanosine-3'-phosphate
  modified_base 18: mod_base = OTHER; note = 2'-O-methyluridine-3'-phosphate
  modified_base 19: mod_base = OTHER; note = 2'-O-methylguanosine-3'-phosphate
  modified_base 20: mod_base = OTHER; note = 2'-O-methyluridine-3'-phosphate
  modified_base 21: mod_base = OTHER; note = 2'-O-methyluridine-3'-phosphorothioate
  modified_base 22: mod_base = OTHER; note = 2'-O-methylcytidine-3'- phosphorothioate
  modified_base 23: mod_base = OTHER; note = 2'-O-methyluridine-3'-phosphate
tcagagacaatctttggtgttct

SEQ ID NO: 3780 - RNA, 23 nt, synthetic construct
  misc_feature 1..23: note = Description of Artificial Sequence: Synthetic oligonucleotide
  source 1..23: mol_type = other RNA
  modified_base 1: mod_base = OTHER; note = 2'-O-methyladenosine-3'- phosphorothioate
  modified_base 2: mod_base = OTHER; note = 2'-fluorouridine -3'-phosphorothioate
  modified_base 3: mod_base = OTHER; note = 2'-O-methylcytidine-3'-phosphate
  modified_base 4: mod_base = OTHER; note = 2'-O-methyladenosine-3'-phosphate
  modified_base 5: mod_base = OTHER; note = 2'-O-methylguanosine-3'-phosphate
  modified_base 6: mod_base = OTHER; note = 2'-fluoroadenosine-3'-phosphate
  modified_base 7: mod_base = OTHER; note = 2'-O-methyluridine-3'-phosphate
  modified_base 8: mod_base = OTHER; note = 2'-fluoroadenosine-3'-phosphate
  modified_base 9: mod_base = OTHER; note = 2'-fluoroadenosine-3'-phosphate
  modified_base 10: mod_base = OTHER; note = 2'-O-methyladenosine-3'-phosphate
  modified_base 11: mod_base = OTHER; note = 2'-O-methyladenosine-3'-phosphate
  modified_base 12: mod_base = OTHER; note = 2'-O-methyladenosine-3'-phosphate
  modified_base 13: mod_base = OTHER; note = 2'-O-methylguanosine-3'-phosphate
  modified_base 14: mod_base = OTHER; note = 2'-fluoroguanosine-3'-phosphate
  modified_base 15: mod_base = OTHER; note = 2'-O-methyladenosine-3'-phosphate
  modified_base 16: mod_base = OTHER; note = 2'-fluorocytidine-3'-phosphate
  modified_base 17: mod_base = OTHER; note = 2'-O-methyladenosine-3'-phosphate
  modified_base 18: mod_base = OTHER; note = 2'-O-methyladenosine-3'-phosphate
  modified_base 19: mod_base = OTHER; note = 2'-O-methylcytidine-3'-phosphate
  modified_base 20: mod_base = OTHER; note = 2'-O-methyladenosine-3'-phosphate
  modified_base 21: mod_base = OTHER; note = 2'-O-methyluridine-3'-phosphorothioate
  modified_base 22: mod_base = OTHER; note = 2'-O-methylguanosine-3'- phosphorothioate
  modified_base 23: mod_base = OTHER; note = 2'-O-methylcytidine-3'-phosphate
atcagataaaaaggacaacatgc

SEQ ID NO: 3781 - RNA, 23 nt, synthetic construct
  misc_feature 1..23: note = Description of Artificial Sequence: Synthetic oligonucleotide
  source 1..23: mol_type = other RNA
  modified_base 1: mod_base = OTHER; note = 2'-O-methyladenosine-3'- phosphorothioate
  modified_base 2: mod_base = OTHER; note = 2'-fluorouridine -3'-phosphorothioate
  modified_base 3: mod_base = OTHER; note = 2'-O-methyluridine-3'-phosphate
  modified_base 4: mod_base = OTHER; note = 2'-O-methyluridine-3'-phosphate
  modified_base 5: mod_base = OTHER; note = 2'-O-methylcytidine-3'-phosphate
  modified_base 6: mod_base = OTHER; note = 2'-fluorouridine-3'-phosphate
  modified_base 7: mod_base = OTHER; note = 2'-O-methyladenosine-3'-phosphate
  modified_base 8: mod_base = OTHER; note = 2'-fluoroadenosine-3'-phosphate
  modified_base 9: mod_base = OTHER; note = 2'-fluorocytidine-3'-phosphate
  modified_base 10: mod_base = OTHER; note = 2'-O-methyluridine-3'-phosphate
  modified_base 11: mod_base = OTHER; note = 2'-O-methyluridine-3'-phosphate
  modified_base 12: mod_base = OTHER; note = 2'-O-methylcytidine-3'-phosphate
  modified_base 13: mod_base = OTHER; note = 2'-O-methyladenosine-3'-phosphate
  modified_base 14: mod_base = OTHER; note = 2'-fluoroguanosine-3'-phosphate
  modified_base 15: mod_base = OTHER; note = 2'-O-methylguanosine-3'-phosphate
  modified_base 16: mod_base = OTHER; note = 2'-fluoroadenosine-3'-phosphate
  modified_base 17: mod_base = OTHER; note = 2'-O-methylguanosine-3'-phosphate
  modified_base 18: mod_base = OTHER; note = 2'-O-methyluridine-3'-phosphate
  modified_base 19: mod_base = OTHER; note = 2'-O-methyluridine-3'-phosphate
  modified_base 20: mod_base = OTHER; note = 2'-O-methylguanosine-3'-phosphate
  modified_base 21: mod_base = OTHER; note = 2'-O-methyladenosine-3'- phosphorothioate
  modified_base 22: mod_base = OTHER; note = 2'-O-methyluridine-3'-phosphorothioate
  modified_base 23: mod_base = OTHER; note = 2'-O-methylguanosine-3'-phosphate
atttctaacttcaggagttgatg

SEQ ID NO: 3782 - RNA, 23 nt, synthetic construct
  misc_feature 1..23: note = Description of Artificial Sequence: Synthetic oligonucleotide
  source 1..23: mol_type = other RNA
  modified_base 1: mod_base = OTHER; note = 2'-O-methyluridine-3'-phosphorothioate
  modified_base 2: mod_base = OTHER; note = 2'-fluoroguanosine-3'-phosphorothioate
  modified_base 3: mod_base = OTHER; note = 2'-O-methylguanosine-3'-phosphate
  modified_base 4: mod_base = OTHER; note = 2'-O-methyluridine-3'-phosphate
  modified_base 5: mod_base = OTHER; note = 2'-O-methyladenosine-3'-phosphate
  modified_base 6: mod_base = OTHER; note = 2'-fluorouridine-3'-phosphate
  modified_base 7: mod_base = OTHER; note = 2'-O-methyladenosine-3'-phosphate
  modified_base 8: mod_base = OTHER; note = 2'-fluoroadenosine-3'-phosphate
  modified_base 9: mod_base = OTHER; note = 2'-fluorocytidine-3'-phosphate
  modified_base 10: mod_base = OTHER; note = 2'-O-methyladenosine-3'-phosphate
  modified_base 11: mod_base = OTHER; note = 2'-O-methylcytidine-3'-phosphate
  modified_base 12: mod_base = OTHER; note = 2'-O-methyluridine-3'-phosphate
  modified_base 13: mod_base = OTHER; note = 2'-O-methyluridine-3'-phosphate
  modified_base 14: mod_base = OTHER; note = 2'-fluoroguanosine-3'-phosphate
  modified_base 15: mod_base = OTHER; note = 2'-O-methylguanosine-3'-phosphate
  modified_base 16: mod_base = OTHER; note = 2'-fluoroadenosine-3'-phosphate
  modified_base 17: mod_base = OTHER; note = 2'-O-methyluridine-3'-phosphate
  modified_base 18: mod_base = OTHER; note = 2'-O-methyladenosine-3'-phosphate
  modified_base 19: mod_base = OTHER; note = 2'-O-methylguanosine-3'-phosphate
  modified_base 20: mod_base = OTHER; note = 2'-O-methyluridine-3'-phosphate
  modified_base 21: mod_base = OTHER; note = 2'-O-methyluridine-3'-phosphorothioate
  modified_base 22: mod_base = OTHER; note = 2'-O-methylguanosine-3'- phosphorothioate
  modified_base 23: mod_base = OTHER; note = 2'-O-methylguanosine-3'-phosphate
tggtataacacttggatagttgg

SEQ ID NO: 3783 - RNA, 23 nt, synthetic construct
  misc_feature 1..23: note = Description of Artificial Sequence: Synthetic oligonucleotide
  source 1..23: mol_type = other RNA
  modified_base 1: mod_base = OTHER; note = 2'-O-methyluridine-3'-phosphorothioate
  modified_base 2: mod_base = OTHER; note = 2'-fluoroadenosine-3'-phosphorothioate
  modified_base 3: mod_base = OTHER; note = 2'-O-methyladenosine-3'-phosphate
  modified_base 4: mod_base = OTHER; note = 2'-O-methyluridine-3'-phosphate
  modified_base 5: mod_base = OTHER; note = 2'-O-methylcytidine-3'-phosphate
  modified_base 6: mod_base = OTHER; note = 2'-fluorouridine-3'-phosphate
  modified_base 7: mod_base = OTHER; note = 2'-O-methyluridine-3'-phosphate
  modified_base 8: mod_base = OTHER; note = 2'-fluorouridine-3'-phosphate
  modified_base 9: mod_base = OTHER; note = 2'-fluoroguanosine-3'-phosphate
  modified_base 10: mod_base = OTHER; note = 2'-O-methylguanosine-3'-phosphate
  modified_base 11: mod_base = OTHER; note = 2'-O-methyluridine-3'-phosphate
  modified_base 12: mod_base = OTHER; note = 2'-O-methylguanosine-3'-phosphate
  modified_base 13: mod_base = OTHER; note = 2'-O-methyluridine-3'-phosphate
  modified_base 14: mod_base = OTHER; note = 2'-fluorouridine-3'-phosphate
  modified_base 15: mod_base = OTHER; note = 2'-O-methylcytidine-3'-phosphate
  modified_base 16: mod_base = OTHER; note = 2'-fluorouridine-3'-phosphate
  modified_base 17: mod_base = OTHER; note = 2'-O-methyladenosine-3'-phosphate
  modified_base 18: mod_base = OTHER; note = 2'-O-methyladenosine-3'-phosphate
  modified_base 19: mod_base = OTHER; note = 2'-O-methylguanosine-3'-phosphate
  modified_base 20: mod_base = OTHER; note = 2'-O-methylguanosine-3'-phosphate
  modified_base 21: mod_base = OTHER; note = 2'-O-methyladenosine-3'- phosphorothioate
  modified_base 22: mod_base = OTHER; note = 2'-O-methyladenosine-3'- phosphorothioate
  modified_base 23: mod_base = OTHER; note = 2'-O-methyladenosine-3'-phosphate
taatctttggtgttctaaggaaa

SEQ ID NO: 3784 - RNA, 23 nt, synthetic construct
  misc_feature 1..23: note = Description of Artificial Sequence: Synthetic oligonucleotide
  source 1..23: mol_type = other RNA
  modified_base 1: mod_base = OTHER; note = 2'-O-methyladenosine-3'- phosphorothioate
  modified_base 2: mod_base = OTHER; note = 2'-fluoroguanosine-3'-phosphorothioate
  modified_base 3: mod_base = OTHER; note = 2'-O-methyladenosine-3'-phosphate
  modified_base 4: mod_base = OTHER; note = 2'-O-methylcytidine-3'-phosphate
  modified_base 5: mod_base = OTHER; note = 2'-O-methyluridine-3'-phosphate
  modified_base 6: mod_base = OTHER; note = 2'-fluoroadenosine-3'-phosphate
  modified_base 7: mod_base = OTHER; note = 2'-O-methylcytidine-3'-phosphate
  modified_base 8: mod_base = OTHER; note = 2'-fluoroadenosine-3'-phosphate
  modified_base 9: mod_base = OTHER; note = 2'-fluorocytidine-3'-phosphate
  modified_base 10: mod_base = OTHER; note = 2'-O-methyladenosine-3'-phosphate
  modified_base 11: mod_base = OTHER; note = 2'-O-methyladenosine-3'-phosphate
  modified_base 12: mod_base = OTHER; note = 2'-O-methylguanosine-3'-phosphate
  modified_base 13: mod_base = OTHER; note = 2'-O-methyladenosine-3'-phosphate
  modified_base 14: mod_base = OTHER; note = 2'-fluorouridine-3'-phosphate
  modified_base 15: mod_base = OTHER; note = 2'-O-methyluridine-3'-phosphate
  modified_base 16: mod_base = OTHER; note = 2'-fluoroadenosine-3'-phosphate
  modified_base 17: mod_base = OTHER; note = 2'-O-methyladenosine-3'-phosphate
  modified_base 18: mod_base = OTHER; note = 2'-O-methyluridine-3'-phosphate
  modified_base 19: mod_base = OTHER; note = 2'-O-methyladenosine-3'-phosphate
  modified_base 20: mod_base = OTHER; note = 2'-O-methylcytidine-3'-phosphate
  modified_base 21: mod_base = OTHER; note = 2'-O-methylcytidine-3'- phosphorothioate
  modified_base 22: mod_base = OTHER; note = 2'-O-methyladenosine-3'- phosphorothioate
  modified_base 23: mod_base = OTHER; note = 2'-O-methyluridine-3'-phosphate
agactacacaagattaataccat

SEQ ID NO: 3785 - RNA, 23 nt, synthetic construct
  misc_feature 1..23: note = Description of Artificial Sequence: Synthetic oligonucleotide
  source 1..23: mol_type = other RNA
  modified_base 1: mod_base = OTHER; note = 2'-O-methyluridine-3'-phosphorothioate
  modified_base 2: mod_base = OTHER; note = 2'-fluoroguanosine-3'-phosphorothioate
  modified_base 3: mod_base = OTHER; note = 2'-O-methylcytidine-3'-phosphate
  modified_base 4: mod_base = OTHER; note = 2'-O-methyladenosine-3'-phosphate
  modified_base 5: mod_base = OTHER; note = 2'-O-methyluridine-3'-phosphate
  modified_base 6: mod_base = OTHER; note = 2'-fluoroguanosine-3'-phosphate
  modified_base 7: mod_base = OTHER; note = 2'-O-methyluridine-3'-phosphate
  modified_base 8: mod_base = OTHER; note = 2'-fluorouridine-3'-phosphate
  modified_base 9: mod_base = OTHER; note = 2'-fluorocytidine-3'-phosphate
  modified_base 10: mod_base = OTHER; note = 2'-O-methyladenosine-3'-phosphate
  modified_base 11: mod_base = OTHER; note = 2'-O-methylguanosine-3'-phosphate
  modified_base 12: mod_base = OTHER; note = 2'-O-methyluridine-3'-phosphate
  modified_base 13: mod_base = OTHER; note = 2'-O-methylguanosine-3'-phosphate
  modified_base 14: mod_base = OTHER; note = 2'-fluoroadenosine-3'-phosphate
  modified_base 15: mod_base = OTHER; note = 2'-O-methyladenosine-3'-phosphate
  modified_base 16: mod_base = OTHER; note = 2'-fluoroguanosine-3'-phosphate
  modified_base 17: mod_base = OTHER; note = 2'-O-methylguanosine-3'-phosphate
  modified_base 18: mod_base = OTHER; note = 2'-O-methyladenosine-3'-phosphate
  modified_base 19: mod_base = OTHER; note = 2'-O-methylguanosine-3'-phosphate
  modified_base 20: mod_base = OTHER; note = 2'-O-methylcytidine-3'-phosphate
  modified_base 21: mod_base = OTHER; note = 2'-O-methylcytidine-3'- phosphorothioate
  modified_base 22: mod_base = OTHER; note = 2'-O-methyladenosine-3'- phosphorothioate
  modified_base 23: mod_base = OTHER; note = 2'-O-methylguanosine-3'-phosphate
tgcatgttcagtgaaggagccag

SEQ ID NO: 3786 - RNA, 23 nt, synthetic construct
  misc_feature 1..23: note = Description of Artificial Sequence: Synthetic oligonucleotide
  source 1..23: mol_type = other RNA
  modified_base 1: mod_base = OTHER; note = 2'-O-methyluridine-3'-phosphorothioate
  modified_base 2: mod_base = OTHER; note = 2'-fluoroguanosine-3'-phosphorothioate
  modified_base 3: mod_base = OTHER; note = 2'-O-methylguanosine-3'-phosphate
  modified_base 4: mod_base = OTHER; note = 2'-O-methyluridine-3'-phosphate
  modified_base 5: mod_base = OTHER; note = 2'-O-methyladenosine-3'-phosphate
  modified_base 6: mod_base = OTHER; note = 2'-fluoroadenosine-3'-phosphate
  modified_base 7: mod_base = OTHER; note = 2'-O-methyluridine-3'-phosphate
  modified_base 8: mod_base = OTHER; note = 2'-fluoroguanosine-3'-phosphate
  modified_base 9: mod_base = OTHER; note = 2'-fluorouridine-3'-phosphate
  modified_base 10: mod_base = OTHER; note = 2'-O-methyladenosine-3'-phosphate
  modified_base 11: mod_base = OTHER; note = 2'-O-methylcytidine-3'-phosphate
  modified_base 12: mod_base = OTHER; note = 2'-O-methyladenosine-3'-phosphate
  modified_base 13: mod_base = OTHER; note = 2'-O-methylcytidine-3'-phosphate
  modified_base 14: mod_base = OTHER; note = 2'-fluorouridine-3'-phosphate
  modified_base 15: mod_base = OTHER; note = 2'-O-methyladenosine-3'-phosphate
  modified_base 16: mod_base = OTHER; note = 2'-fluorocytidine-3'-phosphate
  modified_base 17: mod_base = OTHER; note = 2'-O-methyluridine-3'-phosphate
  modified_base 18: mod_base = OTHER; note = 2'-O-methylguanosine-3'-phosphate
  modified_base 19: mod_base = OTHER; note = 2'-O-methyladenosine-3'-phosphate
  modified_base 20: mod_base = OTHER; note = 2'-O-methyluridine-3'-phosphate
  modified_base 21: mod_base = OTHER; note = 2'-O-methyladenosine-3'- phosphorothioate
  modified_base 22: mod_base = OTHER; note = 2'-O-methyluridine-3'-phosphorothioate
  modified_base 23: mod_base = OTHER; note = 2'-O-methyladenosine-3'-phosphate
tggtaatgtacactactgatata

SEQ ID NO: 3787 - RNA, 23 nt, synthetic construct
  misc_feature 1..23: note = Description of Artificial Sequence: Synthetic oligonucleotide
  source 1..23: mol_type = other RNA
  modified_base 1: mod_base = OTHER; note = 2'-O-methyluridine-3'-phosphorothioate
  modified_base 2: mod_base = OTHER; note = 2'-fluoroguanosine-3'-phosphorothioate
  modified_base 3: mod_base = OTHER; note = 2'-O-methyluridine-3'-phosphate
  modified_base 4: mod_base = OTHER; note = 2'-O-methylguanosine-3'-phosphate
  modified_base 5: mod_base = OTHER; note = 2'-O-methyluridine-3'-phosphate
  modified_base 6: mod_base = OTHER; note = 2'-fluorouridine-3'-phosphate
  modified_base 7: mod_base = OTHER; note = 2'-O-methylcytidine-3'-phosphate
  modified_base 8: mod_base = OTHER; note = 2'-fluorouridine-3'-phosphate
  modified_base 9: mod_base = OTHER; note = 2'-fluoroadenosine-3'-phosphate
  modified_base 10: mod_base = OTHER; note = 2'-O-methyladenosine-3'-phosphate
  modified_base 11: mod_base = OTHER; note = 2'-O-methylguanosine-3'-phosphate
  modified_base 12: mod_base = OTHER; note = 2'-O-methylguanosine-3'-phosphate
  modified_base 13: mod_base = OTHER; note = 2'-O-methyladenosine-3'-phosphate
  modified_base 14: mod_base = OTHER; note = 2'-fluoroadenosine-3'-phosphate
  modified_base 15: mod_base = OTHER; note = 2'-O-methyladenosine-3'-phosphate
  modified_base 16: mod_base = OTHER; note = 2'-fluoroadenosine-3'-phosphate
  modified_base 17: mod_base = OTHER; note = 2'-O-methylguanosine-3'-phosphate
  modified_base 18: mod_base = OTHER; note = 2'-O-methylguanosine-3'-phosphate
  modified_base 19: mod_base = OTHER; note = 2'-O-methylcytidine-3'-phosphate
  modified_base 20: mod_base = OTHER; note = 2'-O-methyluridine-3'-phosphate
  modified_base 21: mod_base = OTHER; note = 2'-O-methylguanosine-3'- phosphorothioate
  modified_base 22: mod_base = OTHER; note = 2'-O-methylcytidine-3'- phosphorothioate
  modified_base 23: mod_base = OTHER; note = 2'-O-methylcytidine-3'-phosphate
tgtgttctaaggaaaaggctgcc

SEQ ID NO: 3788 - RNA, 23 nt, synthetic construct
  misc_feature 1..23: note = Description of Artificial Sequence: Synthetic oligonucleotide
  source 1..23: mol_type = other RNA
  modified_base 1: mod_base = OTHER; note = 2'-O-methyluridine-3'-phosphorothioate
  modified_base 2: mod_base = OTHER; note = 2'-fluoroadenosine-3'-phosphorothioate
  modified_base 3: mod_base = OTHER; note = 2'-O-methyladenosine-3'-phosphate
  modified_base 4: mod_base = OTHER; note = 2'-O-methylcytidine-3'-phosphate
  modified_base 5: mod_base = OTHER; note = 2'-O-methyluridine-3'-phosphate
  modified_base 6: mod_base = OTHER; note = 2'-fluoroadenosine-3'-phosphate
  modified_base 7: mod_base = OTHER; note = 2'-O-methyluridine-3'-phosphate
  modified_base 8: mod_base = OTHER; note = 2'-fluorouridine-3'-phosphate
  modified_base 9: mod_base = OTHER; note = 2'-fluorouridine-3'-phosphate
  modified_base 10: mod_base = OTHER; note = 2'-O-methylcytidine-3'-phosphate
  modified_base 11: mod_base = OTHER; note = 2'-O-methyladenosine-3'-phosphate
  modified_base 12: mod_base = OTHER; note = 2'-O-methylcytidine-3'-phosphate
  modified_base 13: mod_base = OTHER; note = 2'-O-methyladenosine-3'-phosphate
  modified_base 14: mod_base = OTHER; note = 2'-fluorocytidine-3'-phosphate
  modified_base 15: mod_base = OTHER; note = 2'-O-methyluridine-3'-phosphate
  modified_base 16: mod_base = OTHER; note = 2'-fluoroadenosine-3'-phosphate
  modified_base 17: mod_base = OTHER; note = 2'-O-methyladenosine-3'-phosphate
  modified_base 18: mod_base = OTHER; note = 2'-O-methylcytidine-3'-phosphate
  modified_base 19: mod_base = OTHER; note = 2'-O-methylcytidine-3'-phosphate
  modified_base 20: mod_base = OTHER; note = 2'-O-methyladenosine-3'-phosphate
  modified_base 21: mod_base = OTHER; note = 2'-O-methylguanosine-3'- phosphorothioate
  modified_base 22: mod_base = OTHER; note = 2'-O-methyluridine-3'-phosphorothioate
  modified_base 23: mod_base = OTHER; note = 2'-O-methyluridine-3'-phosphate
taactatttcacactaaccagtt

SEQ ID NO: 3789 - RNA, 23 nt, synthetic construct
  misc_feature 1..23: note = Description of Artificial Sequence: Synthetic oligonucleotide
  source 1..23: mol_type = other RNA
  modified_base 1: mod_base = OTHER; note = 2'-O-methyladenosine-3'- phosphorothioate
  modified_base 2: mod_base = OTHER; note = 2'-fluoroadenosine-3'-phosphorothioate
  modified_base 3: mod_base = OTHER; note = 2'-O-methyluridine-3'-phosphate
  modified_base 4: mod_base = OTHER; note = 2'-O-methylguanosine-3'-phosphate
  modified_base 5: mod_base = OTHER; note = 2'-O-methyluridine-3'-phosphate
  modified_base 6: mod_base = OTHER; note = 2'-fluoroadenosine-3'-phosphate
  modified_base 7: mod_base = OTHER; note = 2'-O-methylcytidine-3'-phosphate
  modified_base 8: mod_base = OTHER; note = 2'-fluoroadenosine-3'-phosphate
  modified_base 9: mod_base = OTHER; note = 2'-fluorocytidine-3'-phosphate
  modified_base 10: mod_base = OTHER; note = 2'-O-methyluridine-3'-phosphate
  modified_base 11: mod_base = OTHER; note = 2'-O-methyladenosine-3'-phosphate
  modified_base 12: mod_base = OTHER; note = 2'-O-methylcytidine-3'-phosphate
  modified_base 13: mod_base = OTHER; note = 2'-O-methyluridine-3'-phosphate
  modified_base 14: mod_base = OTHER; note = 2'-fluoroguanosine-3'-phosphate
  modified_base 15: mod_base = OTHER; note = 2'-O-methyladenosine-3'-phosphate
  modified_base 16: mod_base = OTHER; note = 2'-fluorouridine-3'-phosphate
  modified_base 17: mod_base = OTHER; note = 2'-O-methyladenosine-3'-phosphate
  modified_base 18: mod_base = OTHER; note = 2'-O-methyluridine-3'-phosphate
  modified_base 19: mod_base = OTHER; note = 2'-O-methyladenosine-3'-phosphate
  modified_base 20: mod_base = OTHER; note = 2'-O-methylguanosine-3'-phosphate
  modified_base 21: mod_base = OTHER; note = 2'-O-methyluridine-3'-phosphorothioate
  modified_base 22: mod_base = OTHER; note = 2'-O-methyluridine-3'-phosphorothioate
  modified_base 23: mod_base = OTHER; note = 2'-O-methylcytidine-3'-phosphate
aatgtacactactgatatagttc

SEQ ID NO: 3790 - RNA, 23 nt, synthetic construct
  misc_feature 1..23: note = Description of Artificial Sequence: Synthetic oligonucleotide
  source 1..23: mol_type = other RNA
  modified_base 1: mod_base = OTHER; note = 2'-O-methyluridine-3'-phosphorothioate
  modified_base 2: mod_base = OTHER; note = 2'-fluorouridine -3'-phosphorothioate
  modified_base 3: mod_base = OTHER; note = 2'-O-methyladenosine-3'-phosphate
  modified_base 4: mod_base = OTHER; note = 2'-O-methyladenosine-3'-phosphate
  modified_base 5: mod_base = OTHER; note = 2'-O-methyluridine-3'-phosphate
  modified_base 6: mod_base = OTHER; note = 2'-fluoroguanosine-3'-phosphate
  modified_base 7: mod_base = OTHER; note = 2'-O-methyluridine-3'-phosphate
  modified_base 8: mod_base = OTHER; note = 2'-fluoroadenosine-3'-phosphate
  modified_base 9: mod_base = OTHER; note = 2'-fluorocytidine-3'-phosphate
  modified_base 10: mod_base = OTHER; note = 2'-O-methyladenosine-3'-phosphate
  modified_base 11: mod_base = OTHER; note = 2'-O-methylcytidine-3'-phosphate
  modified_base 12: mod_base = OTHER; note = 2'-O-methyluridine-3'-phosphate
  modified_base 13: mod_base = OTHER; note = 2'-O-methyladenosine-3'-phosphate
  modified_base 14: mod_base = OTHER; note = 2'-fluorocytidine-3'-phosphate
  modified_base 15: mod_base = OTHER; note = 2'-O-methyluridine-3'-phosphate
  modified_base 16: mod_base = OTHER; note = 2'-fluoroguanosine-3'-phosphate
  modified_base 17: mod_base = OTHER; note = 2'-O-methyladenosine-3'-phosphate
  modified_base 18: mod_base = OTHER; note = 2'-O-methyluridine-3'-phosphate
  modified_base 19: mod_base = OTHER; note = 2'-O-methyladenosine-3'-phosphate
  modified_base 20: mod_base = OTHER; note = 2'-O-methyluridine-3'-phosphate
  modified_base 21: mod_base = OTHER; note = 2'-O-methyladenosine-3'- phosphorothioate
  modified_base 22: mod_base = OTHER; note = 2'-O-methylguanosine-3'- phosphorothioate
  modified_base 23: mod_base = OTHER; note = 2'-O-methyluridine-3'-phosphate
ttaatgtacactactgatatagt

SEQ ID NO: 3791 - RNA, 23 nt, synthetic construct
  misc_feature 1..23: note = Description of Artificial Sequence: Synthetic oligonucleotide
  source 1..23: mol_type = other RNA
  modified_base 1: mod_base = OTHER; note = 2'-O-methyluridine-3'-phosphorothioate
  modified_base 2: mod_base = OTHER; note = 2'-fluoroadenosine-3'-phosphorothioate
  modified_base 3: mod_base = OTHER; note = 2'-O-methylguanosine-3'-phosphate
  modified_base 4: mod_base = OTHER; note = 2'-O-methyluridine-3'-phosphate
  modified_base 5: mod_base = OTHER; note = 2'-O-methylcytidine-3'-phosphate
  modified_base 6: mod_base = OTHER; note = 2'-fluorocytidine-3'-phosphate
  modified_base 7: mod_base = OTHER; note = 2'-O-methyladenosine-3'-phosphate
  modified_base 8: mod_base = OTHER; note = 2'-fluorouridine-3'-phosphate
  modified_base 9: mod_base = OTHER; note = 2'-fluorocytidine-3'-phosphate
  modified_base 10: mod_base = OTHER; note = 2'-O-methyluridine-3'-phosphate
  modified_base 11: mod_base = OTHER; note = 2'-O-methyluridine-3'-phosphate
  modified_base 12: mod_base = OTHER; note = 2'-O-methyladenosine-3'-phosphate
  modified_base 13: mod_base = OTHER; note = 2'-O-methyladenosine-3'-phosphate
  modified_base 14: mod_base = OTHER; note = 2'-fluoroadenosine-3'-phosphate
  modified_base 15: mod_base = OTHER; note = 2'-O-methyladenosine-3'-phosphate
  modified_base 16: mod_base = OTHER; note = 2'-fluorouridine-3'-phosphate
  modified_base 17: mod_base = OTHER; note = 2'-O-methyladenosine-3'-phosphate
  modified_base 18: mod_base = OTHER; note = 2'-O-methyluridine-3'-phosphate
  modified_base 19: mod_base = OTHER; note = 2'-O-methyluridine-3'-phosphate
  modified_base 20: mod_base = OTHER; note = 2'-O-methyladenosine-3'-phosphate
  modified_base 21: mod_base = OTHER; note = 2'-O-methylcytidine-3'- phosphorothioate
  modified_base 22: mod_base = OTHER; note = 2'-O-methyluridine-3'-phosphorothioate
  modified_base 23: mod_base = OTHER; note = 2'-O-methylguanosine-3'-phosphate
tagtccatcttaaaatattactg

SEQ ID NO: 3792 - RNA, 23 nt, synthetic construct
  misc_feature 1..23: note = Description of Artificial Sequence: Synthetic oligonucleotide
  source 1..23: mol_type = other RNA
  modified_base 1: mod_base = OTHER; note = 2'-O-methyluridine-3'-phosphorothioate
  modified_base 2: mod_base = OTHER; note = 2'-fluorouridine -3'-phosphorothioate
  modified_base 3: mod_base = OTHER; note = 2'-O-methyluridine-3'-phosphate
  modified_base 4: mod_base = OTHER; note = 2'-O-methyluridine-3'-phosphate
  modified_base 5: mod_base = OTHER; note = 2'-O-methylcytidine-3'-phosphate
  modified_base 6: mod_base = OTHER; note = 2'-fluorocytidine-3'-phosphate
  modified_base 7: mod_base = OTHER; note = 2'-O-methylcytidine-3'-phosphate
  modified_base 8: mod_base = OTHER; note = 2'-fluoroadenosine-3'-phosphate
  modified_base 9: mod_base = OTHER; note = 2'-fluoroguanosine-3'-phosphate
  modified_base 10: mod_base = OTHER; note = 2'-O-methyluridine-3'-phosphate
  modified_base 11: mod_base = OTHER; note = 2'-O-methylcytidine-3'-phosphate
  modified_base 12: mod_base = OTHER; note = 2'-O-methylcytidine-3'-phosphate
  modified_base 13: mod_base = OTHER; note = 2'-O-methyladenosine-3'-phosphate
  modified_base 14: mod_base = OTHER; note = 2'-fluorouridine-3'-phosphate
  modified_base 15: mod_base = OTHER; note = 2'-O-methylcytidine-3'-phosphate
  modified_base 16: mod_base = OTHER; note = 2'-fluorouridine-3'-phosphate
  modified_base 17: mod_base = OTHER; note = 2'-O-methyluridine-3'-phosphate
  modified_base 18: mod_base = OTHER; note = 2'-O-methyladenosine-3'-phosphate
  modified_base 19: mod_base = OTHER; note = 2'-O-methyladenosine-3'-phosphate
  modified_base 20: mod_base = OTHER; note = 2'-O-methyladenosine-3'-phosphate
  modified_base 21: mod_base = OTHER; note = 2'-O-methyladenosine-3'- phosphorothioate
  modified_base 22: mod_base = OTHER; note = 2'-O-methyluridine-3'-phosphorothioate
  modified_base 23: mod_base = OTHER; note = 2'-O-methyladenosine-3'-phosphate
ttttcccagtccatcttaaaata

SEQ ID NO: 3793 - RNA, 23 nt, synthetic construct
  misc_feature 1..23: note = Description of Artificial Sequence: Synthetic oligonucleotide
  source 1..23: mol_type = other RNA
  modified_base 1: mod_base = OTHER; note = 2'-O-methyladenosine-3'- phosphorothioate
  modified_base 2: mod_base = OTHER; note = 2'-fluoroguanosine-3'-phosphorothioate
  modified_base 3: mod_base = OTHER; note = 2'-O-methyladenosine-3'-phosphate
  modified_base 4: mod_base = OTHER; note = 2'-O-methyladenosine-3'-phosphate
  modified_base 5: mod_base = OTHER; note = 2'-O-methylcytidine-3'-phosphate
  modified_base 6: mod_base = OTHER; note = 2'-fluorouridine-3'-phosphate
  modified_base 7: mod_base = OTHER; note = 2'-O-methyladenosine-3'-phosphate
  modified_base 8: mod_base = OTHER; note = 2'-fluorouridine-3'-phosphate
  modified_base 9: mod_base = OTHER; note = 2'-fluorouridine-3'-phosphate
  modified_base 10: mod_base = OTHER; note = 2'-O-methyluridine-3'-phosphate
  modified_base 11: mod_base = OTHER; note = 2'-O-methylcytidine-3'-phosphate
  modified_base 12: mod_base = OTHER; note = 2'-O-methyladenosine-3'-phosphate
  modified_base 13: mod_base = OTHER; note = 2'-O-methylcytidine-3'-phosphate
  modified_base 14: mod_base = OTHER; note = 2'-fluoroadenosine-3'-phosphate
  modified_base 15: mod_base = OTHER; note = 2'-O-methylcytidine-3'-phosphate
  modified_base 16: mod_base = OTHER; note = 2'-fluorouridine-3'-phosphate
  modified_base 17: mod_base = OTHER; note = 2'-O-methyladenosine-3'-phosphate
  modified_base 18: mod_base = OTHER; note = 2'-O-methyladenosine-3'-phosphate
  modified_base 19: mod_base = OTHER; note = 2'-O-methylcytidine-3'-phosphate
  modified_base 20: mod_base = OTHER; note = 2'-O-methylcytidine-3'-phosphate
  modified_base 21: mod_base = OTHER; note = 2'-O-methyladenosine-3'- phosphorothioate
  modified_base 22: mod_base = OTHER; note = 2'-O-methylguanosine-3'- phosphorothioate
  modified_base 23: mod_base = OTHER; note = 2'-O-methyluridine-3'-phosphate
agaactatttcacactaaccagt

SEQ ID NO: 3794 - RNA, 23 nt, synthetic construct
  misc_feature 1..23: note = Description of Artificial Sequence: Synthetic oligonucleotide
  source 1..23: mol_type = other RNA
  modified_base 1: mod_base = OTHER; note = 2'-O-methyluridine-3'-phosphorothioate
  modified_base 2: mod_base = OTHER; note = 2'-fluoroguanosine-3'-phosphorothioate
  modified_base 3: mod_base = OTHER; note = 2'-O-methyladenosine-3'-phosphate
  modified_base 4: mod_base = OTHER; note = 2'-O-methylcytidine-3'-phosphate
  modified_base 5: mod_base = OTHER; note = 2'-O-methyluridine-3'-phosphate
  modified_base 6: mod_base = OTHER; note = 2'-fluoroadenosine-3'-phosphate
  modified_base 7: mod_base = OTHER; note = 2'-O-methylguanosine-3'-phosphate
  modified_base 8: mod_base = OTHER; note = 2'-fluoroguanosine-3'-phosphate
  modified_base 9: mod_base = OTHER; note = 2'-fluorocytidine-3'-phosphate
  modified_base 10: mod_base = OTHER; note = 2'-O-methyladenosine-3'-phosphate
  modified_base 11: mod_base = OTHER; note = 2'-O-methyluridine-3'-phosphate
  modified_base 12: mod_base = OTHER; note = 2'-O-methylguanosine-3'-phosphate
  modified_base 13: mod_base = OTHER; note = 2'-O-methyluridine-3'-phosphate
  modified_base 14: mod_base = OTHER; note = 2'-fluorouridine-3'-phosphate
  modified_base 15: mod_base = OTHER; note = 2'-O-methylcytidine-3'-phosphate
  modified_base 16: mod_base = OTHER; note = 2'-fluoroadenosine-3'-phosphate
  modified_base 17: mod_base = OTHER; note = 2'-O-methylguanosine-3'-phosphate
  modified_base 18: mod_base = OTHER; note = 2'-O-methyluridine-3'-phosphate
  modified_base 19: mod_base = OTHER; note = 2'-O-methylguanosine-3'-phosphate
  modified_base 20: mod_base = OTHER; note = 2'-O-methyladenosine-3'-phosphate
  modified_base 21: mod_base = OTHER; note = 2'-O-methyladenosine-3'- phosphorothioate
  modified_base 22: mod_base = OTHER; note = 2'-O-methylguanosine-3'- phosphorothioate
  modified_base 23: mod_base = OTHER; note = 2'-O-methylguanosine-3'-phosphate
tgactaggcatgttcagtgaagg

SEQ ID NO: 3795 - RNA, 23 nt, synthetic construct
  misc_feature 1..23: note = Description of Artificial Sequence: Synthetic oligonucleotide
  source 1..23: mol_type = other RNA
  modified_base 1: mod_base = OTHER; note = 2'-O-methyluridine-3'-phosphorothioate
  modified_base 2: mod_base = OTHER; note = 2'-fluoroadenosine-3'-phosphorothioate
  modified_base 3: mod_base = OTHER; note = 2'-O-methyluridine-3'-phosphate
  modified_base 4: mod_base = OTHER; note = 2'-O-methyladenosine-3'-phosphate
  modified_base 5: mod_base = OTHER; note = 2'-O-methyladenosine-3'-phosphate
  modified_base 6: mod_base = OTHER; note = 2'-fluorocytidine-3'-phosphate
  modified_base 7: mod_base = OTHER; note = 2'-O-methyladenosine-3'-phosphate
  modified_base 8: mod_base = OTHER; note = 2'-fluorocytidine-3'-phosphate
  modified_base 9: mod_base = OTHER; note = 2'-fluorouridine-3'-phosphate
  modified_base 10: mod_base = OTHER; note = 2'-O-methyluridine-3'-phosphate
  modified_base 11: mod_base = OTHER; note = 2'-O-methylguanosine-3'-phosphate
  modified_base 12: mod_base = OTHER; note = 2'-O-methylguanosine-3'-phosphate
  modified_base 13: mod_base = OTHER; note = 2'-O-methyladenosine-3'-phosphate
  modified_base 14: mod_base = OTHER; note = 2'-fluorouridine-3'-phosphate
  modified_base 15: mod_base = OTHER; note = 2'-O-methyladenosine-3'-phosphate
  modified_base 16: mod_base = OTHER; note = 2'-fluoroguanosine-3'-phosphate
  modified_base 17: mod_base = OTHER; note = 2'-O-methyluridine-3'-phosphate
  modified_base 18: mod_base = OTHER; note = 2'-O-methyluridine-3'-phosphate
  modified_base 19: mod_base = OTHER; note = 2'-O-methylguanosine-3'-phosphate
  modified_base 20: mod_base = OTHER; note = 2'-O-methylguanosine-3'-phosphate
  modified_base 21: mod_base = OTHER; note = 2'-O-methyluridine-3'-phosphorothioate
  modified_base 22: mod_base = OTHER; note = 2'-O-methyluridine-3'-phosphorothioate
  modified_base 23: mod_base = OTHER; note = 2'-O-methylguanosine-3'-phosphate
tataacacttggatagttggttg

SEQ ID NO: 3796 - RNA, 23 nt, synthetic construct
  misc_feature 1..23: note = Description of Artificial Sequence: Synthetic oligonucleotide
  source 1..23: mol_type = other RNA
  modified_base 1: mod_base = OTHER; note = 2'-O-methyluridine-3'-phosphorothioate
  modified_base 2: mod_base = OTHER; note = 2'-fluorouridine -3'-phosphorothioate
  modified_base 3: mod_base = OTHER; note = 2'-O-methyluridine-3'-phosphate
  modified_base 4: mod_base = OTHER; note = 2'-O-methyladenosine-3'-phosphate
  modified_base 5: mod_base = OTHER; note = 2'-O-methylguanosine-3'-phosphate
  modified_base 6: mod_base = OTHER; note = 2'-fluorouridine-3'-phosphate
  modified_base 7: mod_base = OTHER; note = 2'-O-methyluridine-3'-phosphate
  modified_base 8: mod_base = OTHER; note = 2'-fluoroguanosine-3'-phosphate
  modified_base 9: mod_base = OTHER; note = 2'-fluoroguanosine-3'-phosphate
  modified_base 10: mod_base = OTHER; note = 2'-O-methyluridine-3'-phosphate
  modified_base 11: mod_base = OTHER; note = 2'-O-methyladenosine-3'-phosphate
  modified_base 12: mod_base = OTHER; note = 2'-O-methyluridine-3'-phosphate
  modified_base 13: mod_base = OTHER; note = 2'-O-methyladenosine-3'-phosphate
  modified_base 14: mod_base = OTHER; note = 2'-fluoroadenosine-3'-phosphate
  modified_base 15: mod_base = OTHER; note = 2'-O-methylcytidine-3'-phosphate
  modified_base 16: mod_base = OTHER; note = 2'-fluoroadenosine-3'-phosphate
  modified_base 17: mod_base = OTHER; note = 2'-O-methylcytidine-3'-phosphate
  modified_base 18: mod_base = OTHER; note = 2'-O-methyluridine-3'-phosphate
  modified_base 19: mod_base = OTHER; note = 2'-O-methyluridine-3'-phosphate
  modified_base 20: mod_base = OTHER; note = 2'-O-methylguanosine-3'-phosphate
  modified_base 21: mod_base = OTHER; note = 2'-O-methylguanosine-3'- phosphorothioate
  modified_base 22: mod_base = OTHER; note = 2'-O-methyladenosine-3'- phosphorothioate
  modified_base 23: mod_base = OTHER; note = 2'-O-methyluridine-3'-phosphate
tttagttggtataacacttggat

SEQ ID NO: 3797 - RNA, 23 nt, synthetic construct
  misc_feature 1..23: note = Description of Artificial Sequence: Synthetic oligonucleotide
  source 1..23: mol_type = other RNA
  modified_base 1: mod_base = OTHER; note = 2'-O-methyluridine-3'-phosphorothioate
  modified_base 2: mod_base = OTHER; note = 2'-fluoroguanosine-3'-phosphorothioate
  modified_base 3: mod_base = OTHER; note = 2'-O-methylguanosine-3'-phosphate
  modified_base 4: mod_base = OTHER; note = 2'-O-methyladenosine-3'-phosphate
  modified_base 5: mod_base = OTHER; note = 2'-O-methylcytidine-3'-phosphate
  modified_base 6: mod_base = OTHER; note = 2'-fluorouridine-3'-phosphate
  modified_base 7: mod_base = OTHER; note = 2'-O-methyluridine-3'-phosphate
  modified_base 8: mod_base = OTHER; note = 2'-fluoroguanosine-3'-phosphate
  modified_base 9: mod_base = OTHER; note = 2'-fluoroguanosine-3'-phosphate
  modified_base 10: mod_base = OTHER; note = 2'-O-methyladenosine-3'-phosphate
  modified_base 11: mod_base = OTHER; note = 2'-O-methyladenosine-3'-phosphate
  modified_base 12: mod_base = OTHER; note = 2'-O-methylcytidine-3'-phosphate
  modified_base 13: mod_base = OTHER; note = 2'-O-methylcytidine-3'-phosphate
  modified_base 14: mod_base = OTHER; note = 2'-fluoroadenosine-3'-phosphate
  modified_base 15: mod_base = OTHER; note = 2'-O-methyladenosine-3'-phosphate
  modified_base 16: mod_base = OTHER; note = 2'-fluoroadenosine-3'-phosphate
  modified_base 17: mod_base = OTHER; note = 2'-O-methyladenosine-3'-phosphate
  modified_base 18: mod_base = OTHER; note = 2'-O-methylguanosine-3'-phosphate
  modified_base 19: mod_base = OTHER; note = 2'-O-methylguanosine-3'-phosphate
  modified_base 20: mod_base = OTHER; note = 2'-O-methyladenosine-3'-phosphate
  modified_base 21: mod_base = OTHER; note = 2'-O-methyladenosine-3'- phosphorothioate
  modified_base 22: mod_base = OTHER; note = 2'-O-methyluridine-3'-phosphorothioate
  modified_base 23: mod_base = OTHER; note = 2'-O-methylcytidine-3'-phosphate
tggacttggaaccaaaaggaatc

SEQ ID NO: 3798 - RNA, 23 nt, synthetic construct
  misc_feature 1..23: note = Description of Artificial Sequence: Synthetic oligonucleotide
  source 1..23: mol_type = other RNA
  modified_base 1: mod_base = OTHER; note = 2'-O-methyluridine-3'-phosphorothioate
  modified_base 2: mod_base = OTHER; note = 2'-fluorouridine -3'-phosphorothioate
  modified_base 3: mod_base = OTHER; note = 2'-O-methylguanosine-3'-phosphate
  modified_base 4: mod_base = OTHER; note = 2'-O-methyluridine-3'-phosphate
  modified_base 5: mod_base = OTHER; note = 2'-O-methyluridine-3'-phosphate
  modified_base 6: mod_base = OTHER; note = 2'-fluorocytidine-3'-phosphate
  modified_base 7: mod_base = OTHER; note = 2'-O-methyluridine-3'-phosphate
  modified_base 8: mod_base = OTHER; note = 2'-fluoroadenosine-3'-phosphate
  modified_base 9: mod_base = OTHER; note = 2'-fluoroadenosine-3'-phosphate
  modified_base 10: mod_base = OTHER; note = 2'-O-methylguanosine-3'-phosphate
  modified_base 11: mod_base = OTHER; note = 2'-O-methylguanosine-3'-phosphate
  modified_base 12: mod_base = OTHER; note = 2'-O-methyladenosine-3'-phosphate
  modified_base 13: mod_base = OTHER; note = 2'-O-methyladenosine-3'-phosphate
  modified_base 14: mod_base = OTHER; note = 2'-fluoroadenosine-3'-phosphate
  modified_base 15: mod_base = OTHER; note = 2'-O-methyladenosine-3'-phosphate
  modified_base 16: mod_base = OTHER; note = 2'-fluoroguanosine-3'-phosphate
  modified_base 17: mod_base = OTHER; note = 2'-O-methylguanosine-3'-phosphate
  modified_base 18: mod_base = OTHER; note = 2'-O-methylcytidine-3'-phosphate
  modified_base 19: mod_base = OTHER; note = 2'-O-methyluridine-3'-phosphate
  modified_base 20: mod_base = OTHER; note = 2'-O-methylguanosine-3'-phosphate
  modified_base 21: mod_base = OTHER; note = 2'-O-methylcytidine-3'- phosphorothioate
  modified_base 22: mod_base = OTHER; note = 2'-O-methylcytidine-3'- phosphorothioate
  modified_base 23: mod_base = OTHER; note = 2'-O-methyladenosine-3'-phosphate
ttgttctaaggaaaaggctgcca

SEQ ID NO: 3799 - RNA, 23 nt, synthetic construct
  misc_feature 1..23: note = Description of Artificial Sequence: Synthetic oligonucleotide
  source 1..23: mol_type = other RNA
  modified_base 1: mod_base = OTHER; note = 2'-O-methyladenosine-3'- phosphorothioate
  modified_base 2: mod_base = OTHER; note = 2'-fluoroguanosine-3'-phosphorothioate
  modified_base 3: mod_base = OTHER; note = 2'-O-methyluridine-3'-phosphate
  modified_base 4: mod_base = OTHER; note = 2'-O-methylcytidine-3'-phosphate
  modified_base 5: mod_base = OTHER; note = 2'-O-methylcytidine-3'-phosphate
  modified_base 6: mod_base = OTHER; note = 2'-fluoroadenosine-3'-phosphate
  modified_base 7: mod_base = OTHER; note = 2'-O-methyluridine-3'-phosphate
  modified_base 8: mod_base = OTHER; note = 2'-fluorocytidine-3'-phosphate
  modified_base 9: mod_base = OTHER; note = 2'-fluorouridine-3'-phosphate
  modified_base 10: mod_base = OTHER; note = 2'-O-methyluridine-3'-phosphate
  modified_base 11: mod_base = OTHER; note = 2'-O-methyladenosine-3'-phosphate
  modified_base 12: mod_base = OTHER; note = 2'-O-methyladenosine-3'-phosphate
  modified_base 13: mod_base = OTHER; note = 2'-O-methyladenosine-3'-phosphate
  modified_base 14: mod_base = OTHER; note = 2'-fluoroadenosine-3'-phosphate
  modified_base 15: mod_base = OTHER; note = 2'-O-methyluridine-3'-phosphate
  modified_base 16: mod_base = OTHER; note = 2'-fluoroadenosine-3'-phosphate
  modified_base 17: mod_base = OTHER; note = 2'-O-methyluridine-3'-phosphate
  modified_base 18: mod_base = OTHER; note = 2'-O-methyluridine-3'-phosphate
  modified_base 19: mod_base = OTHER; note = 2'-O-methyladenosine-3'-phosphate
  modified_base 20: mod_base = OTHER; note = 2'-O-methylcytidine-3'-phosphate
  modified_base 21: mod_base = OTHER; note = 2'-O-methyluridine-3'-phosphorothioate
  modified_base 22: mod_base = OTHER; note = 2'-O-methylguanosine-3'- phosphorothioate
  modified_base 23: mod_base = OTHER; note = 2'-O-methylcytidine-3'-phosphate
agtccatcttaaaatattactgc

SEQ ID NO: 3800 - RNA, 23 nt, synthetic construct
  misc_feature 1..23: note = Description of Artificial Sequence: Synthetic oligonucleotide
  source 1..23: mol_type = other RNA
  modified_base 1: mod_base = OTHER; note = 2'-O-methyluridine-3'-phosphorothioate
  modified_base 2: mod_base = OTHER; note = 2'-fluoroadenosine-3'-phosphorothioate
  modified_base 3: mod_base = OTHER; note = 2'-O-methylguanosine-3'-phosphate
  modified_base 4: mod_base = OTHER; note = 2'-O-methylguanosine-3'-phosphate
  modified_base 5: mod_base = OTHER; note = 2'-O-methyladenosine-3'-phosphate
  modified_base 6: mod_base = OTHER; note = 2'-fluorouridine-3'-phosphate
  modified_base 7: mod_base = OTHER; note = 2'-O-methyladenosine-3'-phosphate
  modified_base 8: mod_base = OTHER; note = 2'-fluorouridine-3'-phosphate
  modified_base 9: mod_base = OTHER; note = 2'-fluoroadenosine-3'-phosphate
  modified_base 10: mod_base = OTHER; note = 2'-O-methylguanosine-3'-phosphate
  modified_base 11: mod_base = OTHER; note = 2'-O-methylcytidine-3'-phosphate
  modified_base 12: mod_base = OTHER; note = 2'-O-methyluridine-3'-phosphate
  modified_base 13: mod_base = OTHER; note = 2'-O-methylguanosine-3'-phosphate
  modified_base 14: mod_base = OTHER; note = 2'-fluorouridine-3'-phosphate
  modified_base 15: mod_base = OTHER; note = 2'-O-methylguanosine-3'-phosphate
  modified_base 16: mod_base = OTHER; note = 2'-fluoroguanosine-3'-phosphate
  modified_base 17: mod_base = OTHER; note = 2'-O-methyladenosine-3'-phosphate
  modified_base 18: mod_base = OTHER; note = 2'-O-methyluridine-3'-phosphate
  modified_base 19: mod_base = OTHER; note = 2'-O-methyluridine-3'-phosphate
  modified_base 20: mod_base = OTHER; note = 2'-O-methyluridine-3'-phosphate
  modified_base 21: mod_base = OTHER; note = 2'-O-methyluridine-3'-phosphorothioate
  modified_base 22: mod_base = OTHER; note = 2'-O-methyladenosine-3'- phosphorothioate
  modified_base 23: mod_base = OTHER; note = 2'-O-methylcytidine-3'-phosphate
taggatatagctgtggattttac

SEQ ID NO: 3801 - RNA, 23 nt, synthetic construct
  misc_feature 1..23: note = Description of Artificial Sequence: Synthetic oligonucleotide
  source 1..23: mol_type = other RNA
  modified_base 1: mod_base = OTHER; note = 2'-O-methyluridine-3'-phosphorothioate
  modified_base 2: mod_base = OTHER; note = 2'-fluorouridine -3'-phosphorothioate
  modified_base 3: mod_base = OTHER; note = 2'-O-methyladenosine-3'-phosphate
  modified_base 4: mod_base = OTHER; note = 2'-O-methylguanosine-3'-phosphate
  modified_base 5: mod_base = OTHER; note = 2'-O-methylguanosine-3'-phosphate
  modified_base 6: mod_base = OTHER; note = 2'-fluorocytidine-3'-phosphate
  modified_base 7: mod_base = OTHER; note = 2'-O-methyladenosine-3'-phosphate
  modified_base 8: mod_base = OTHER; note = 2'-fluorouridine-3'-phosphate
  modified_base 9: mod_base = OTHER; note = 2'-fluoroguanosine-3'-phosphate
  modified_base 10: mod_base = OTHER; note = 2'-O-methyluridine-3'-phosphate
  modified_base 11: mod_base = OTHER; note = 2'-O-methyluridine-3'-phosphate
  modified_base 12: mod_base = OTHER; note = 2'-O-methylcytidine-3'-phosphate
  modified_base 13: mod_base = OTHER; note = 2'-O-methyladenosine-3'-phosphate
  modified_base 14: mod_base = OTHER; note = 2'-fluoroguanosine-3'-phosphate
  modified_base 15: mod_base = OTHER; note = 2'-O-methyluridine-3'-phosphate
  modified_base 16: mod_base = OTHER; note = 2'-fluoroguanosine-3'-phosphate
  modified_base 17: mod_base = OTHER; note = 2'-O-methyladenosine-3'-phosphate
  modified_base 18: mod_base = OTHER; note = 2'-O-methyladenosine-3'-phosphate
  modified_base 19: mod_base = OTHER; note = 2'-O-methylguanosine-3'-phosphate
  modified_base 20: mod_base = OTHER; note = 2'-O-methylguanosine-3'-phosphate
  modified_base 21: mod_base = OTHER; note = 2'-O-methyladenosine-3'- phosphorothioate
  modified_base 22: mod_base = OTHER; note = 2'-O-methylguanosine-3'- phosphorothioate
  modified_base 23: mod_base = OTHER; note = 2'-O-methylcytidine-3'-phosphate
ttaggcatgttcagtgaaggagc

SEQ ID NO: 3802 - RNA, 23 nt, synthetic construct
  misc_feature 1..23: note = Description of Artificial Sequence: Synthetic oligonucleotide
  source 1..23: mol_type = other RNA
  modified_base 1: mod_base = OTHER; note = 2'-O-methyluridine-3'-phosphorothioate
  modified_base 2: mod_base = OTHER; note = 2'-fluorouridine -3'-phosphorothioate
  modified_base 3: mod_base = OTHER; note = 2'-O-methylguanosine-3'-phosphate
  modified_base 4: mod_base = OTHER; note = 2'-O-methylguanosine-3'-phosphate
  modified_base 5: mod_base = OTHER; note = 2'-O-methyladenosine-3'-phosphate
  modified_base 6: mod_base = OTHER; note = 2'-fluorocytidine-3'-phosphate
  modified_base 7: mod_base = OTHER; note = 2'-O-methyluridine-3'-phosphate
  modified_base 8: mod_base = OTHER; note = 2'-fluoroadenosine-3'-phosphate
  modified_base 9: mod_base = OTHER; note = 2'-fluoroguanosine-3'-phosphate
  modified_base 10: mod_base = OTHER; note = 2'-O-methylguanosine-3'-phosphate
  modified_base 11: mod_base = OTHER; note = 2'-O-methylcytidine-3'-phosphate
  modified_base 12: mod_base = OTHER; note = 2'-O-methyladenosine-3'-phosphate
  modified_base 13: mod_base = OTHER; note = 2'-O-methyluridine-3'-phosphate
  modified_base 14: mod_base = OTHER; note = 2'-fluoroguanosine-3'-phosphate
  modified_base 15: mod_base = OTHER; note = 2'-O-methyluridine-3'-phosphate
  modified_base 16: mod_base = OTHER; note = 2'-fluorouridine-3'-phosphate
  modified_base 17: mod_base = OTHER; note = 2'-O-methylcytidine-3'-phosphate
  modified_base 18: mod_base = OTHER; note = 2'-O-methyladenosine-3'-phosphate
  modified_base 19: mod_base = OTHER; note = 2'-O-methylguanosine-3'-phosphate
  modified_base 20: mod_base = OTHER; note = 2'-O-methyluridine-3'-phosphate
  modified_base 21: mod_base = OTHER; note = 2'-O-methylguanosine-3'- phosphorothioate
  modified_base 22: mod_base = OTHER; note = 2'-O-methyladenosine-3'- phosphorothioate
  modified_base 23: mod_base = OTHER; note = 2'-O-methyladenosine-3'-phosphate
ttggactaggcatgttcagtgaa

SEQ ID NO: 3803 - RNA, 23 nt, synthetic construct
  misc_feature 1..23: note = Description of Artificial Sequence: Synthetic oligonucleotide
  source 1..23: mol_type = other RNA
  modified_base 1: mod_base = OTHER; note = 2'-O-methylguanosine-3'- phosphorothioate
  modified_base 2: mod_base = OTHER; note = 2'-fluorouridine -3'-phosphorothioate
  modified_base 3: mod_base = OTHER; note = 2'-O-methyluridine-3'-phosphate
  modified_base 4: mod_base = OTHER; note = 2'-O-methyluridine-3'-phosphate
  modified_base 5: mod_base = OTHER; note = 2'-O-methyluridine-3'-phosphate
  modified_base 6: mod_base = OTHER; note = 2'-fluoroadenosine-3'-phosphate
  modified_base 7: mod_base = OTHER; note = 2'-O-methylguanosine-3'-phosphate
  modified_base 8: mod_base = OTHER; note = 2'-fluorouridine-3'-phosphate
  modified_base 9: mod_base = OTHER; note = 2'-fluorouridine-3'-phosphate
  modified_base 10: mod_base = OTHER; note = 2'-O-methylguanosine-3'-phosphate
  modified_base 11: mod_base = OTHER; note = 2'-O-methylguanosine-3'-phosphate
  modified_base 12: mod_base = OTHER; note = 2'-O-methyluridine-3'-phosphate
  modified_base 13: mod_base = OTHER; note = 2'-O-methyladenosine-3'-phosphate
  modified_base 14: mod_base = OTHER; note = 2'-fluorouridine-3'-phosphate
  modified_base 15: mod_base = OTHER; note = 2'-O-methyladenosine-3'-phosphate
  modified_base 16: mod_base = OTHER; note = 2'-fluoroadenosine-3'-phosphate
  modified_base 17: mod_base = OTHER; note = 2'-O-methylcytidine-3'-phosphate
  modified_base 18: mod_base = OTHER; note = 2'-O-methyladenosine-3'-phosphate
  modified_base 19: mod_base = OTHER; note = 2'-O-methylcytidine-3'-phosphate
  modified_base 20: mod_base = OTHER; note = 2'-O-methyluridine-3'-phosphate
  modified_base 21: mod_base = OTHER; note = 2'-O-methyluridine-3'-phosphorothioate
  modified_base 22: mod_base = OTHER; note = 2'-O-methylguanosine-3'- phosphorothioate
  modified_base 23: mod_base = OTHER; note = 2'-O-methylguanosine-3'-phosphate
gttttagttggtataacacttgg

SEQ ID NO: 3804 - RNA, 23 nt, synthetic construct
  misc_feature 1..23: note = Description of Artificial Sequence: Synthetic oligonucleotide
  source 1..23: mol_type = other RNA
  modified_base 1: mod_base = OTHER; note = 2'-O-methyladenosine-3'- phosphorothioate
  modified_base 2: mod_base = OTHER; note = 2'-fluoroguanosine-3'-phosphorothioate
  modified_base 3: mod_base = OTHER; note = 2'-O-methyladenosine-3'-phosphate
  modified_base 4: mod_base = OTHER; note = 2'-O-methylcytidine-3'-phosphate
  modified_base 5: mod_base = OTHER; note = 2'-O-methylcytidine-3'-phosphate
  modified_base 6: mod_base = OTHER; note = 2'-fluorocytidine-3'-phosphate
  modified_base 7: mod_base = OTHER; note = 2'-O-methyluridine-3'-phosphate
  modified_base 8: mod_base = OTHER; note = 2'-fluorouridine-3'-phosphate
  modified_base 9: mod_base = OTHER; note = 2'-fluoroadenosine-3'-phosphate
  modified_base 10: mod_base = OTHER; note = 2'-O-methyladenosine-3'-phosphate
  modified_base 11: mod_base = OTHER; note = 2'-O-methyluridine-3'-phosphate
  modified_base 12: mod_base = OTHER; note = 2'-O-methylcytidine-3'-phosphate
  modified_base 13: mod_base = OTHER; note = 2'-O-methyladenosine-3'-phosphate
  modified_base 14: mod_base = OTHER; note = 2'-fluorouridine-3'-phosphate
  modified_base 15: mod_base = OTHER; note = 2'-O-methylguanosine-3'-phosphate
  modified_base 16: mod_base = OTHER; note = 2'-fluoroguanosine-3'-phosphate
  modified_base 17: mod_base = OTHER; note = 2'-O-methyluridine-3'-phosphate
  modified_base 18: mod_base = OTHER; note = 2'-O-methylguanosine-3'-phosphate
  modified_base 19: mod_base = OTHER; note = 2'-O-methylguanosine-3'-phosphate
  modified_base 20: mod_base = OTHER; note = 2'-O-methyladenosine-3'-phosphate
  modified_base 21: mod_base = OTHER; note = 2'-O-methyladenosine-3'- phosphorothioate
  modified_base 22: mod_base = OTHER; note = 2'-O-methyladenosine-3'- phosphorothioate
  modified_base 23: mod_base = OTHER; note = 2'-O-methylcytidine-3'-phosphate
agacccttaatcatggtggaaac

SEQ ID NO: 3805 - RNA, 23 nt, synthetic construct
  misc_feature 1..23: note = Description of Artificial Sequence: Synthetic oligonucleotide
  source 1..23: mol_type = other RNA
  modified_base 1: mod_base = OTHER; note = 2'-O-methyladenosine-3'- phosphorothioate
  modified_base 2: mod_base = OTHER; note = 2'-fluoroadenosine-3'-phosphorothioate
  modified_base 3: mod_base = OTHER; note = 2'-O-methyluridine-3'-phosphate
  modified_base 4: mod_base = OTHER; note = 2'-O-methylguanosine-3'-phosphate
  modified_base 5: mod_base = OTHER; note = 2'-O-methyluridine-3'-phosphate
  modified_base 6: mod_base = OTHER; note = 2'-fluorouridine-3'-phosphate
  modified_base 7: mod_base = OTHER; note = 2'-O-methylguanosine-3'-phosphate
  modified_base 8: mod_base = OTHER; note = 2'-fluoroguanosine-3'-phosphate
  modified_base 9: mod_base = OTHER; note = 2'-fluoroadenosine-3'-phosphate
  modified_base 10: mod_base = OTHER; note = 2'-O-methylcytidine-3'-phosphate
  modified_base 11: mod_base = OTHER; note = 2'-O-methyluridine-3'-phosphate
  modified_base 12: mod_base = OTHER; note = 2'-O-methyladenosine-3'-phosphate
  modified_base 13: mod_base = OTHER; note = 2'-O-methylguanosine-3'-phosphate
  modified_base 14: mod_base = OTHER; note = 2'-fluoroguanosine-3'-phosphate
  modified_base 15: mod_base = OTHER; note = 2'-O-methylcytidine-3'-phosphate
  modified_base 16: mod_base = OTHER; note = 2'-fluoroadenosine-3'-phosphate
  modified_base 17: mod_base = OTHER; note = 2'-O-methyluridine-3'-phosphate
  modified_base 18: mod_base = OTHER; note = 2'-O-methylguanosine-3'-phosphate
  modified_base 19: mod_base = OTHER; note = 2'-O-methyluridine-3'-phosphate
  modified_base 20: mod_base = OTHER; note = 2'-O-methyluridine-3'-phosphate
  modified_base 21: mod_base = OTHER; note = 2'-O-methylcytidine-3'- phosphorothioate
  modified_base 22: mod_base = OTHER; note = 2'-O-methyladenosine-3'- phosphorothioate
  modified_base 23: mod_base = OTHER; note = 2'-O-methylguanosine-3'-phosphate
aatgttggactaggcatgttcag

SEQ ID NO: 3806 - RNA, 23 nt, synthetic construct
  misc_feature 1..23: note = Description of Artificial Sequence: Synthetic oligonucleotide
  source 1..23: mol_type = other RNA
  modified_base 1: mod_base = OTHER; note = 2'-O-methyladenosine-3'- phosphorothioate
  modified_base 2: mod_base = OTHER; note = 2'-fluorouridine -3'-phosphorothioate
  modified_base 3: mod_base = OTHER; note = 2'-O-methylguanosine-3'-phosphate
  modified_base 4: mod_base = OTHER; note = 2'-O-methylguanosine-3'-phosphate
  modified_base 5: mod_base = OTHER; note = 2'-O-methyluridine-3'-phosphate
  modified_base 6: mod_base = OTHER; note = 2'-fluoroadenosine-3'-phosphate
  modified_base 7: mod_base = OTHER; note = 2'-O-methyladenosine-3'-phosphate
  modified_base 8: mod_base = OTHER; note = 2'-fluorouridine-3'-phosphate
  modified_base 9: mod_base = OTHER; note = 2'-fluoroguanosine-3'-phosphate
  modified_base 10: mod_base = OTHER; note = 2'-O-methyluridine-3'-phosphate
  modified_base 11: mod_base = OTHER; note = 2'-O-methyladenosine-3'-phosphate
  modified_base 12: mod_base = OTHER; note = 2'-O-methylcytidine-3'-phosphate
  modified_base 13: mod_base = OTHER; note = 2'-O-methyladenosine-3'-phosphate
  modified_base 14: mod_base = OTHER; note = 2'-fluorocytidine-3'-phosphate
  modified_base 15: mod_base = OTHER; note = 2'-O-methyluridine-3'-phosphate
  modified_base 16: mod_base = OTHER; note = 2'-fluoroadenosine-3'-phosphate
  modified_base 17: mod_base = OTHER; note = 2'-O-methylcytidine-3'-phosphate
  modified_base 18: mod_base = OTHER; note = 2'-O-methyluridine-3'-phosphate
  modified_base 19: mod_base = OTHER; note = 2'-O-methylguanosine-3'-phosphate
  modified_base 20: mod_base = OTHER; note = 2'-O-methyladenosine-3'-phosphate
  modified_base 21: mod_base = OTHER; note = 2'-O-methyluridine-3'-phosphorothioate
  modified_base 22: mod_base = OTHER; note = 2'-O-methyladenosine-3'- phosphorothioate
  modified_base 23: mod_base = OTHER; note = 2'-O-methyluridine-3'-phosphate
atggtaatgtacactactgatat

SEQ ID NO: 3807 - RNA, 23 nt, synthetic construct
  misc_feature 1..23: note = Description of Artificial Sequence: Synthetic oligonucleotide
  source 1..23: mol_type = other RNA
  modified_base 1: mod_base = OTHER; note = 2'-O-methyluridine-3'-phosphorothioate
  modified_base 2: mod_base = OTHER; note = 2'-fluoroadenosine-3'-phosphorothioate
  modified_base 3: mod_base = OTHER; note = 2'-O-methylguanosine-3'-phosphate
  modified_base 4: mod_base = OTHER; note = 2'-O-methyluridine-3'-phosphate
  modified_base 5: mod_base = OTHER; note = 2'-O-methyluridine-3'-phosphate
  modified_base 6: mod_base = OTHER; note = 2'-fluoroguanosine-3'-phosphate
  modified_base 7: mod_base = OTHER; note = 2'-O-methylguanosine-3'-phosphate
  modified_base 8: mod_base = OTHER; note = 2'-fluorouridine-3'-phosphate
  modified_base 9: mod_base = OTHER; note = 2'-fluoroadenosine-3'-phosphate
  modified_base 10: mod_base = OTHER; note = 2'-O-methyluridine-3'-phosphate
  modified_base 11: mod_base = OTHER; note = 2'-O-methyladenosine-3'-phosphate
  modified_base 12: mod_base = OTHER; note = 2'-O-methyladenosine-3'-phosphate
  modified_base 13: mod_base = OTHER; note = 2'-O-methylcytidine-3'-phosphate
  modified_base 14: mod_base = OTHER; note = 2'-fluoroadenosine-3'-phosphate
  modified_base 15: mod_base = OTHER; note = 2'-O-methylcytidine-3'-phosphate
  modified_base 16: mod_base = OTHER; note = 2'-fluorouridine-3'-phosphate
  modified_base 17: mod_base = OTHER; note = 2'-O-methyluridine-3'-phosphate
  modified_base 18: mod_base = OTHER; note = 2'-O-methylguanosine-3'-phosphate
  modified_base 19: mod_base = OTHER; note = 2'-O-methylguanosine-3'-phosphate
  modified_base 20: mod_base = OTHER; note = 2'-O-methyladenosine-3'-phosphate
  modified_base 21: mod_base = OTHER; note = 2'-O-methyluridine-3'-phosphorothioate
  modified_base 22: mod_base = OTHER; note = 2'-O-methyladenosine-3'- phosphorothioate
  modified_base 23: mod_base = OTHER; note = 2'-O-methylguanosine-3'-phosphate
tagttggtataacacttggatag

SEQ ID NO: 3808 - RNA, 23 nt, synthetic construct
  misc_feature 1..23: note = Description of Artificial Sequence: Synthetic oligonucleotide
  source 1..23: mol_type = other RNA
  modified_base 1: mod_base = OTHER; note = 2'-O-methyluridine-3'-phosphorothioate
  modified_base 2: mod_base = OTHER; note = 2'-fluoroadenosine-3'-phosphorothioate
  modified_base 3: mod_base = OTHER; note = 2'-O-methylguanosine-3'-phosphate
  modified_base 4: mod_base = OTHER; note = 2'-O-methyluridine-3'-phosphate
  modified_base 5: mod_base = OTHER; note = 2'-O-methyluridine-3'-phosphate
  modified_base 6: mod_base = OTHER; note = 2'-fluoroguanosine-3'-phosphate
  modified_base 7: mod_base = OTHER; note = 2'-O-methylcytidine-3'-phosphate
  modified_base 8: mod_base = OTHER; note = 2'-fluorocytidine-3'-phosphate
  modified_base 9: mod_base = OTHER; note = 2'-fluoroadenosine-3'-phosphate
  modified_base 10: mod_base = OTHER; note = 2'-O-methyluridine-3'-phosphate
  modified_base 11: mod_base = OTHER; note = 2'-O-methyladenosine-3'-phosphate
  modified_base 12: mod_base = OTHER; note = 2'-O-methyluridine-3'-phosphate
  modified_base 13: mod_base = OTHER; note = 2'-O-methyluridine-3'-phosphate
  modified_base 14: mod_base = OTHER; note = 2'-fluoroguanosine-3'-phosphate
  modified_base 15: mod_base = OTHER; note = 2'-O-methylguanosine-3'-phosphate
  modified_base 16: mod_base = OTHER; note = 2'-fluoroadenosine-3'-phosphate
  modified_base 17: mod_base = OTHER; note = 2'-O-methylcytidine-3'-phosphate
  modified_base 18: mod_base = OTHER; note = 2'-O-methyluridine-3'-phosphate
  modified_base 19: mod_base = OTHER; note = 2'-O-methyluridine-3'-phosphate
  modified_base 20: mod_base = OTHER; note = 2'-O-methylguanosine-3'-phosphate
  modified_base 21: mod_base = OTHER; note = 2'-O-methylguanosine-3'- phosphorothioate
  modified_base 22: mod_base = OTHER; note = 2'-O-methyladenosine-3'- phosphorothioate
  modified_base 23: mod_base = OTHER; note = 2'-O-methyladenosine-3'-phosphate
tagttgccatattggacttggaa

SEQ ID NO: 3809 - RNA, 23 nt, synthetic construct
  misc_feature 1..23: note = Description of Artificial Sequence: Synthetic oligonucleotide
  source 1..23: mol_type = other RNA
  modified_base 1: mod_base = OTHER; note = 2'-O-methyluridine-3'-phosphorothioate
  modified_base 2: mod_base = OTHER; note = 2'-fluoroadenosine-3'-phosphorothioate
  modified_base 3: mod_base = OTHER; note = 2'-O-methylcytidine-3'-phosphate
  modified_base 4: mod_base = OTHER; note = 2'-O-methylcytidine-3'-phosphate
  modified_base 5: mod_base = OTHER; note = 2'-O-methyluridine-3'-phosphate
  modified_base 6: mod_base = OTHER; note = 2'-fluorouridine-3'-phosphate
  modified_base 7: mod_base = OTHER; note = 2'-O-methylcytidine-3'-phosphate
  modified_base 8: mod_base = OTHER; note = 2'-fluoroadenosine-3'-phosphate
  modified_base 9: mod_base = OTHER; note = 2'-fluorocytidine-3'-phosphate
  modified_base 10: mod_base = OTHER; note = 2'-O-methyladenosine-3'-phosphate
  modified_base 11: mod_base = OTHER; note = 2'-O-methyladenosine-3'-phosphate
  modified_base 12: mod_base = OTHER; note = 2'-O-methylguanosine-3'-phosphate
  modified_base 13: mod_base = OTHER; note = 2'-O-methylguanosine-3'-phosphate
  modified_base 14: mod_base = OTHER; note = 2'-fluorouridine-3'-phosphate
  modified_base 15: mod_base = OTHER; note = 2'-O-methylcytidine-3'-phosphate
  modified_base 16: mod_base = OTHER; note = 2'-fluorouridine-3'-phosphate
  modified_base 17: mod_base = OTHER; note = 2'-O-methylguanosine-3'-phosphate
  modified_base 18: mod_base = OTHER; note = 2'-O-methyladenosine-3'-phosphate
  modified_base 19: mod_base = OTHER; note = 2'-O-methylguanosine-3'-phosphate
  modified_base 20: mod_base = OTHER; note = 2'-O-methyladenosine-3'-phosphate
  modified_base 21: mod_base = OTHER; note = 2'-O-methyluridine-3'-phosphorothioate
  modified_base 22: mod_base = OTHER; note = 2'-O-methyluridine-3'-phosphorothioate
  modified_base 23: mod_base = OTHER; note = 2'-O-methylcytidine-3'-phosphate
taccttcacaaggtctgagattc

SEQ ID NO: 3810 - RNA, 23 nt, synthetic construct
  misc_feature 1..23: note = Description of Artificial Sequence: Synthetic oligonucleotide
  source 1..23: mol_type = other RNA
  modified_base 1: mod_base = OTHER; note = 2'-O-methyluridine-3'-phosphorothioate
  modified_base 2: mod_base = OTHER; note = 2'-fluoroguanosine-3'-phosphorothioate
  modified_base 3: mod_base = OTHER; note = 2'-O-methyluridine-3'-phosphate
  modified_base 4: mod_base = OTHER; note = 2'-O-methyladenosine-3'-phosphate
  modified_base 5: mod_base = OTHER; note = 2'-O-methylguanosine-3'-phosphate
  modified_base 6: mod_base = OTHER; note = 2'-fluorocytidine-3'-phosphate
  modified_base 7: mod_base = OTHER; note = 2'-O-methylcytidine-3'-phosphate
  modified_base 8: mod_base = OTHER; note = 2'-fluorouridine-3'-phosphate
  modified_base 9: mod_base = OTHER; note = 2'-fluoroadenosine-3'-phosphate
  modified_base 10: mod_base = OTHER; note = 2'-O-methylguanosine-3'-phosphate
  modified_base 11: mod_base = OTHER; note = 2'-O-methyladenosine-3'-phosphate
  modified_base 12: mod_base = OTHER; note = 2'-O-methylcytidine-3'-phosphate
  modified_base 13: mod_base = OTHER; note = 2'-O-methyladenosine-3'-phosphate
  modified_base 14: mod_base = OTHER; note = 2'-fluoroguanosine-3'-phosphate
  modified_base 15: mod_base = OTHER; note = 2'-O-methyluridine-3'-phosphate
  modified_base 16: mod_base = OTHER; note = 2'-fluoroguanosine-3'-phosphate
  modified_base 17: mod_base = OTHER; note = 2'-O-methyladenosine-3'-phosphate
  modified_base 18: mod_base = OTHER; note = 2'-O-methyladenosine-3'-phosphate
  modified_base 19: mod_base = OTHER; note = 2'-O-methyladenosine-3'-phosphate
  modified_base 20: mod_base = OTHER; note = 2'-O-methyluridine-3'-phosphate
  modified_base 21: mod_base = OTHER; note = 2'-O-methylguanosine-3'- phosphorothioate
  modified_base 22: mod_base = OTHER; note = 2'-O-methyladenosine-3'- phosphorothioate
  modified_base 23: mod_base = OTHER; note = 2'-O-methyluridine-3'-phosphate
tgtagcctagacagtgaaatgat

SEQ ID NO: 3811 - RNA, 23 nt, synthetic construct
  misc_feature 1..23: note = Description of Artificial Sequence: Synthetic oligonucleotide
  source 1..23: mol_type = other RNA
  modified_base 1: mod_base = OTHER; note = 2'-O-methyladenosine-3'- phosphorothioate
  modified_base 2: mod_base = OTHER; note = 2'-fluoroguanosine-3'-phosphorothioate
  modified_base 3: mod_base = OTHER; note = 2'-O-methylcytidine-3'-phosphate
  modified_base 4: mod_base = OTHER; note = 2'-O-methyladenosine-3'-phosphate
  modified_base 5: mod_base = OTHER; note = 2'-O-methyluridine-3'-phosphate
  modified_base 6: mod_base = OTHER; note = 2'-fluorocytidine-3'-phosphate
  modified_base 7: mod_base = OTHER; note = 2'-O-methyladenosine-3'-phosphate
  modified_base 8: mod_base = OTHER; note = 2'-fluoroguanosine-3'-phosphate
  modified_base 9: mod_base = OTHER; note = 2'-fluoroguanosine-3'-phosphate
  modified_base 10: mod_base = OTHER; note = 2'-O-methyladenosine-3'-phosphate
  modified_base 11: mod_base = OTHER; note = 2'-O-methyluridine-3'-phosphate
  modified_base 12: mod_base = OTHER; note = 2'-O-methyladenosine-3'-phosphate
  modified_base 13: mod_base = OTHER; note = 2'-O-methyluridine-3'-phosphate
  modified_base 14: mod_base = OTHER; note = 2'-fluoroadenosine-3'-phosphate
  modified_base 15: mod_base = OTHER; note = 2'-O-methylguanosine-3'-phosphate
  modified_base 16: mod_base = OTHER; note = 2'-fluorocytidine-3'-phosphate
  modified_base 17: mod_base = OTHER; note = 2'-O-methyluridine-3'-phosphate
  modified_base 18: mod_base = OTHER; note = 2'-O-methylguanosine-3'-phosphate
  modified_base 19: mod_base = OTHER; note = 2'-O-methyluridine-3'-phosphate
  modified_base 20: mod_base = OTHER; note = 2'-O-methylguanosine-3'-phosphate
  modified_base 21: mod_base = OTHER; note = 2'-O-methylguanosine-3'- phosphorothioate
  modified_base 22: mod_base = OTHER; note = 2'-O-methyladenosine-3'- phosphorothioate
  modified_base 23: mod_base = OTHER; note = 2'-O-methyluridine-3'-phosphate
agcatcaggatatagctgtggat

SEQ ID NO: 3812 - RNA, 23 nt, synthetic construct
  misc_feature 1..23: note = Description of Artificial Sequence: Synthetic oligonucleotide
  source 1..23: mol_type = other RNA
  modified_base 1: mod_base = OTHER; note = 2'-O-methyluridine-3'-phosphorothioate
  modified_base 2: mod_base = OTHER; note = 2'-fluoroadenosine-3'-phosphorothioate
  modified_base 3: mod_base = OTHER; note = 2'-O-methylcytidine-3'-phosphate
  modified_base 4: mod_base = OTHER; note = 2'-O-methyluridine-3'-phosphate
  modified_base 5: mod_base = OTHER; note = 2'-O-methyladenosine-3'-phosphate
  modified_base 6: mod_base = OTHER; note = 2'-fluoroguanosine-3'-phosphate
  modified_base 7: mod_base = OTHER; note = 2'-O-methylguanosine-3'-phosphate
  modified_base 8: mod_base = OTHER; note = 2'-fluorocytidine-3'-phosphate
  modified_base 9: mod_base = OTHER; note = 2'-fluoroadenosine-3'-phosphate
  modified_base 10: mod_base = OTHER; note = 2'-O-methyluridine-3'-phosphate
  modified_base 11: mod_base = OTHER; note = 2'-O-methylguanosine-3'-phosphate
  modified_base 12: mod_base = OTHER; note = 2'-O-methyluridine-3'-phosphate
  modified_base 13: mod_base = OTHER; note = 2'-O-methyluridine-3'-phosphate
  modified_base 14: mod_base = OTHER; note = 2'-fluorocytidine-3'-phosphate
  modified_base 15: mod_base = OTHER; note = 2'-O-methyladenosine-3'-phosphate
  modified_base 16: mod_base = OTHER; note = 2'-fluoroguanosine-3'-phosphate
  modified_base 17: mod_base = OTHER; note = 2'-O-methyluridine-3'-phosphate
  modified_base 18: mod_base = OTHER; note = 2'-O-methylguanosine-3'-phosphate
  modified_base 19: mod_base = OTHER; note = 2'-O-methyladenosine-3'-phosphate
  modified_base 20: mod_base = OTHER; note = 2'-O-methyladenosine-3'-phosphate
  modified_base 21: mod_base = OTHER; note = 2'-O-methylguanosine-3'- phosphorothioate
  modified_base 22: mod_base = OTHER; note = 2'-O-methylguanosine-3'- phosphorothioate
  modified_base 23: mod_base = OTHER; note = 2'-O-methyladenosine-3'-phosphate
tactaggcatgttcagtgaagga

SEQ ID NO: 3813 - RNA, 23 nt, synthetic construct
  misc_feature 1..23: note = Description of Artificial Sequence: Synthetic oligonucleotide
  source 1..23: mol_type = other RNA
  modified_base 1: mod_base = OTHER; note = 2'-O-methyluridine-3'-phosphorothioate
  modified_base 2: mod_base = OTHER; note = 2'-fluorouridine -3'-phosphorothioate
  modified_base 3: mod_base = OTHER; note = 2'-O-methylcytidine-3'-phosphate
  modified_base 4: mod_base = OTHER; note = 2'-O-methyladenosine-3'-phosphate
  modified_base 5: mod_base = OTHER; note = 2'-O-methyluridine-3'-phosphate
  modified_base 6: mod_base = OTHER; note = 2'-fluoroadenosine-3'-phosphate
  modified_base 7: mod_base = OTHER; note = 2'-O-methyladenosine-3'-phosphate
  modified_base 8: mod_base = OTHER; note = 2'-fluoroguanosine-3'-phosphate
  modified_base 9: mod_base = OTHER; note = 2'-fluorocytidine-3'-phosphate
  modified_base 10: mod_base = OTHER; note = 2'-O-methyladenosine-3'-phosphate
  modified_base 11: mod_base = OTHER; note = 2'-O-methylcytidine-3'-phosphate
  modified_base 12: mod_base = OTHER; note = 2'-O-methyluridine-3'-phosphate
  modified_base 13: mod_base = OTHER; note = 2'-O-methylcytidine-3'-phosphate
  modified_base 14: mod_base = OTHER; note = 2'-fluorouridine-3'-phosphate
  modified_base 15: mod_base = OTHER; note = 2'-O-methylcytidine-3'-phosphate
  modified_base 16: mod_base = OTHER; note = 2'-fluoroadenosine-3'-phosphate
  modified_base 17: mod_base = OTHER; note = 2'-O-methyladenosine-3'-phosphate
  modified_base 18: mod_base = OTHER; note = 2'-O-methylcytidine-3'-phosphate
  modified_base 19: mod_base = OTHER; note = 2'-O-methylcytidine-3'-phosphate
  modified_base 20: mod_base = OTHER; note = 2'-O-methyladenosine-3'-phosphate
  modified_base 21: mod_base = OTHER; note = 2'-O-methylcytidine-3'- phosphorothioate
  modified_base 22: mod_base = OTHER; note = 2'-O-methylcytidine-3'- phosphorothioate
  modified_base 23: mod_base = OTHER; note = 2'-O-methyluridine-3'-phosphate
ttcataagcactctcaaccacct

SEQ ID NO: 3814 - RNA, 23 nt, synthetic construct
  misc_feature 1..23: note = Description of Artificial Sequence: Synthetic oligonucleotide
  source 1..23: mol_type = other RNA
  modified_base 1: mod_base = OTHER; note = 2'-O-methyluridine-3'-phosphorothioate
  modified_base 2: mod_base = OTHER; note = 2'-fluoroadenosine-3'-phosphorothioate
  modified_base 3: mod_base = OTHER; note = 2'-O-methyluridine-3'-phosphate
  modified_base 4: mod_base = OTHER; note = 2'-O-methylguanosine-3'-phosphate
  modified_base 5: mod_base = OTHER; note = 2'-O-methyluridine-3'-phosphate
  modified_base 6: mod_base = OTHER; note = 2'-fluoroguanosine-3'-phosphate
  modified_base 7: mod_base = OTHER; note = 2'-O-methyluridine-3'-phosphate
  modified_base 8: mod_base = OTHER; note = 2'-fluoroadenosine-3'-phosphate
  modified_base 9: mod_base = OTHER; note = 2'-fluoroguanosine-3'-phosphate
  modified_base 10: mod_base = OTHER; note = 2'-O-methylcytidine-3'-phosphate
  modified_base 11: mod_base = OTHER; note = 2'-O-methylcytidine-3'-phosphate
  modified_base 12: mod_base = OTHER; note = 2'-O-methyluridine-3'-phosphate
  modified_base 13: mod_base = OTHER; note = 2'-O-methyluridine-3'-phosphate
  modified_base 14: mod_base = OTHER; note = 2'-fluorouridine-3'-phosphate
  modified_base 15: mod_base = OTHER; note = 2'-O-methylguanosine-3'-phosphate
  modified_base 16: mod_base = OTHER; note = 2'-fluoroadenosine-3'-phosphate
  modified_base 17: mod_base = OTHER; note = 2'-O-methylguanosine-3'-phosphate
  modified_base 18: mod_base = OTHER; note = 2'-O-methyluridine-3'-phosphate
  modified_base 19: mod_base = OTHER; note = 2'-O-methyluridine-3'-phosphate
  modified_base 20: mod_base = OTHER; note = 2'-O-methyluridine-3'-phosphate
  modified_base 21: mod_base = OTHER; note = 2'-O-methylguanosine-3'- phosphorothioate
  modified_base 22: mod_base = OTHER; note = 2'-O-methyladenosine-3'- phosphorothioate
  modified_base 23: mod_base = OTHER; note = 2'-O-methyluridine-3'-phosphate
tatgtgtagcctttgagtttgat

SEQ ID NO: 3815 - RNA, 23 nt, synthetic construct
  misc_feature 1..23: note = Description of Artificial Sequence: Synthetic oligonucleotide
  source 1..23: mol_type = other RNA
  modified_base 1: mod_base = OTHER; note = 2'-O-methyluridine-3'-phosphorothioate
  modified_base 2: mod_base = OTHER; note = 2'-fluoroguanosine-3'-phosphorothioate
  modified_base 3: mod_base = OTHER; note = 2'-O-methyluridine-3'-phosphate
  modified_base 4: mod_base = OTHER; note = 2'-O-methyladenosine-3'-phosphate
  modified_base 5: mod_base = OTHER; note = 2'-O-methyladenosine-3'-phosphate
  modified_base 6: mod_base = OTHER; note = 2'-fluorouridine-3'-phosphate
  modified_base 7: mod_base = OTHER; note = 2'-O-methylguanosine-3'-phosphate
  modified_base 8: mod_base = OTHER; note = 2'-fluorouridine-3'-phosphate
  modified_base 9: mod_base = OTHER; note = 2'-fluoroadenosine-3'-phosphate
  modified_base 10: mod_base = OTHER; note = 2'-O-methylcytidine-3'-phosphate
  modified_base 11: mod_base = OTHER; note = 2'-O-methyladenosine-3'-phosphate
  modified_base 12: mod_base = OTHER; note = 2'-O-methylcytidine-3'-phosphate
  modified_base 13: mod_base = OTHER; note = 2'-O-methyluridine-3'-phosphate
  modified_base 14: mod_base = OTHER; note = 2'-fluoroadenosine-3'-phosphate
  modified_base 15: mod_base = OTHER; note = 2'-O-methylcytidine-3'-phosphate
  modified_base 16: mod_base = OTHER; note = 2'-fluorouridine-3'-phosphate
  modified_base 17: mod_base = OTHER; note = 2'-O-methylguanosine-3'-phosphate
  modified_base 18: mod_base = OTHER; note = 2'-O-methyladenosine-3'-phosphate
  modified_base 19: mod_base = OTHER; note = 2'-O-methyluridine-3'-phosphate
  modified_base 20: mod_base = OTHER; note = 2'-O-methyladenosine-3'-phosphate
  modified_base 21: mod_base = OTHER; note = 2'-O-methyluridine-3'-phosphorothioate
  modified_base 22: mod_base = OTHER; note = 2'-O-methyladenosine-3'- phosphorothioate
  modified_base 23: mod_base = OTHER; note = 2'-O-methylguanosine-3'-phosphate
tgtaatgtacactactgatatag

SEQ ID NO: 3816 - RNA, 23 nt, synthetic construct
  misc_feature 1..23: note = Description of Artificial Sequence: Synthetic oligonucleotide
  source 1..23: mol_type = other RNA
  modified_base 1: mod_base = OTHER; note = 2'-O-methyluridine-3'-phosphorothioate
  modified_base 2: mod_base = OTHER; note = 2'-fluoroadenosine-3'-phosphorothioate
  modified_base 3: mod_base = OTHER; note = 2'-O-methyladenosine-3'-phosphate
  modified_base 4: mod_base = OTHER; note = 2'-O-methylcytidine-3'-phosphate
  modified_base 5: mod_base = OTHER; note = 2'-O-methyladenosine-3'-phosphate
  modified_base 6: mod_base = OTHER; note = 2'-fluorocytidine-3'-phosphate
  modified_base 7: mod_base = OTHER; note = 2'-O-methyluridine-3'-phosphate
  modified_base 8: mod_base = OTHER; note = 2'-fluorouridine-3'-phosphate
  modified_base 9: mod_base = OTHER; note = 2'-fluoroguanosine-3'-phosphate
  modified_base 10: mod_base = OTHER; note = 2'-O-methylguanosine-3'-phosphate
  modified_base 11: mod_base = OTHER; note = 2'-O-methyladenosine-3'-phosphate
  modified_base 12: mod_base = OTHER; note = 2'-O-methyluridine-3'-phosphate
  modified_base 13: mod_base = OTHER; note = 2'-O-methyladenosine-3'-phosphate
  modified_base 14: mod_base = OTHER; note = 2'-fluoroguanosine-3'-phosphate
  modified_base 15: mod_base = OTHER; note = 2'-O-methyluridine-3'-phosphate
  modified_base 16: mod_base = OTHER; note = 2'-fluorouridine-3'-phosphate
  modified_base 17: mod_base = OTHER; note = 2'-O-methylguanosine-3'-phosphate
  modified_base 18: mod_base = OTHER; note = 2'-O-methylguanosine-3'-phosphate
  modified_base 19: mod_base = OTHER; note = 2'-O-methyluridine-3'-phosphate
  modified_base 20: mod_base = OTHER; note = 2'-O-methyluridine-3'-phosphate
  modified_base 21: mod_base = OTHER; note = 2'-O-methylguanosine-3'- phosphorothioate
  modified_base 22: mod_base = OTHER; note = 2'-O-methylcytidine-3'- phosphorothioate
  modified_base 23: mod_base = OTHER; note = 2'-O-methyladenosine-3'-phosphate
taacacttggatagttggttgca

SEQ ID NO: 3817 - RNA, 23 nt, synthetic construct
  misc_feature 1..23: note = Description of Artificial Sequence: Synthetic oligonucleotide
  source 1..23: mol_type = other RNA
  modified_base 1: mod_base = OTHER; note = 2'-O-methyluridine-3'-phosphorothioate
  modified_base 2: mod_base = OTHER; note = 2'-fluorocytidine-3'-phosphorothioate
  modified_base 3: mod_base = OTHER; note = 2'-O-methyluridine-3'-phosphate
  modified_base 4: mod_base = OTHER; note = 2'-O-methyluridine-3'-phosphate
  modified_base 5: mod_base = OTHER; note = 2'-O-methylcytidine-3'-phosphate
  modified_base 6: mod_base = OTHER; note = 2'-fluoroadenosine-3'-phosphate
  modified_base 7: mod_base = OTHER; note = 2'-O-methyladenosine-3'-phosphate
  modified_base 8: mod_base = OTHER; note = 2'-fluorouridine-3'-phosphate
  modified_base 9: mod_base = OTHER; note = 2'-fluorouridine-3'-phosphate
  modified_base 10: mod_base = OTHER; note = 2'-O-methyluridine-3'-phosphate
  modified_base 11: mod_base = OTHER; note = 2'-O-methylguanosine-3'-phosphate
  modified_base 12: mod_base = OTHER; note = 2'-O-methyluridine-3'-phosphate
  modified_base 13: mod_base = OTHER; note = 2'-O-methylcytidine-3'-phosphate
  modified_base 14: mod_base = OTHER; note = 2'-fluorouridine-3'-phosphate
  modified_base 15: mod_base = OTHER; note = 2'-O-methyluridine-3'-phosphate
  modified_base 16: mod_base = OTHER; note = 2'-fluorocytidine-3'-phosphate
  modified_base 17: mod_base = OTHER; note = 2'-O-methylguanosine-3'-phosphate
  modified_base 18: mod_base = OTHER; note = 2'-O-methyladenosine-3'-phosphate
  modified_base 19: mod_base = OTHER; note = 2'-O-methyluridine-3'-phosphate
  modified_base 20: mod_base = OTHER; note = 2'-O-methylguanosine-3'-phosphate
  modified_base 21: mod_base = OTHER; note = 2'-O-methyladenosine-3'- phosphorothioate
  modified_base 22: mod_base = OTHER; note = 2'-O-methylcytidine-3'- phosphorothioate
  modified_base 23: mod_base = OTHER; note = 2'-O-methyladenosine-3'-phosphate
tcttcaatttgtcttcgatgaca

SEQ ID NO: 3818 - RNA, 23 nt, synthetic construct
  misc_feature 1..23: note = Description of Artificial Sequence: Synthetic oligonucleotide
  source 1..23: mol_type = other RNA
  modified_base 1: mod_base = OTHER; note = 2'-O-methyluridine-3'-phosphorothioate
  modified_base 2: mod_base = OTHER; note = 2'-fluoroadenosine-3'-phosphorothioate
  modified_base 3: mod_base = OTHER; note = 2'-O-methyluridine-3'-phosphate
  modified_base 4: mod_base = OTHER; note = 2'-O-methyladenosine-3'-phosphate
  modified_base 5: mod_base = OTHER; note = 2'-O-methylcytidine-3'-phosphate
  modified_base 6: mod_base = OTHER; note = 2'-fluorouridine-3'-phosphate
  modified_base 7: mod_base = OTHER; note = 2'-O-methylcytidine-3'-phosphate
  modified_base 8: mod_base = OTHER; note = 2'-fluorouridine-3'-phosphate
  modified_base 9: mod_base = OTHER; note = 2'-fluorocytidine-3'-phosphate
  modified_base 10: mod_base = OTHER; note = 2'-O-methyluridine-3'-phosphate
  modified_base 11: mod_base = OTHER; note = 2'-O-methylguanosine-3'-phosphate
  modified_base 12: mod_base = OTHER; note = 2'-O-methylcytidine-3'-phosphate
  modified_base 13: mod_base = OTHER; note = 2'-O-methylcytidine-3'-phosphate
  modified_base 14: mod_base = OTHER; note = 2'-fluoroadenosine-3'-phosphate
  modified_base 15: mod_base = OTHER; note = 2'-O-methyladenosine-3'-phosphate
  modified_base 16: mod_base = OTHER; note = 2'-fluoroadenosine-3'-phosphate
  modified_base 17: mod_base = OTHER; note = 2'-O-methyluridine-3'-phosphate
  modified_base 18: mod_base = OTHER; note = 2'-O-methylcytidine-3'-phosphate
  modified_base 19: mod_base = OTHER; note = 2'-O-methyluridine-3'-phosphate
  modified_base 20: mod_base = OTHER; note = 2'-O-methylguanosine-3'-phosphate
  modified_base 21: mod_base = OTHER; note = 2'-O-methylcytidine-3'- phosphorothioate
  modified_base 22: mod_base = OTHER; note = 2'-O-methyluridine-3'-phosphorothioate
  modified_base 23: mod_base = OTHER; note = 2'-O-methyladenosine-3'-phosphate
tatactctctgccaaatctgcta

SEQ ID NO: 3819 - RNA, 23 nt, synthetic construct
  misc_feature 1..23: note = Description of Artificial Sequence: Synthetic oligonucleotide
  source 1..23: mol_type = other RNA
  modified_base 1: mod_base = OTHER; note = 2'-O-methyluridine-3'-phosphorothioate
  modified_base 2: mod_base = OTHER; note = 2'-fluoroadenosine-3'-phosphorothioate
  modified_base 3: mod_base = OTHER; note = 2'-O-methylguanosine-3'-phosphate
  modified_base 4: mod_base = OTHER; note = 2'-O-methylguanosine-3'-phosphate
  modified_base 5: mod_base = OTHER; note = 2'-O-methylcytidine-3'-phosphate
  modified_base 6: mod_base = OTHER; note = 2'-fluoroadenosine-3'-phosphate
  modified_base 7: mod_base = OTHER; note = 2'-O-methyluridine-3'-phosphate
  modified_base 8: mod_base = OTHER; note = 2'-fluoroguanosine-3'-phosphate
  modified_base 9: mod_base = OTHER; note = 2'-fluorouridine-3'-phosphate
  modified_base 10: mod_base = OTHER; note = 2'-O-methyluridine-3'-phosphate
  modified_base 11: mod_base = OTHER; note = 2'-O-methylcytidine-3'-phosphate
  modified_base 12: mod_base = OTHER; note = 2'-O-methyladenosine-3'-phosphate
  modified_base 13: mod_base = OTHER; note = 2'-O-methylguanosine-3'-phosphate
  modified_base 14: mod_base = OTHER; note = 2'-fluorouridine-3'-phosphate
  modified_base 15: mod_base = OTHER; note = 2'-O-methylguanosine-3'-phosphate
  modified_base 16: mod_base = OTHER; note = 2'-fluoroadenosine-3'-phosphate
  modified_base 17: mod_base = OTHER; note = 2'-O-methyladenosine-3'-phosphate
  modified_base 18: mod_base = OTHER; note = 2'-O-methylguanosine-3'-phosphate
  modified_base 19: mod_base = OTHER; note = 2'-O-methylguanosine-3'-phosphate
  modified_base 20: mod_base = OTHER; note = 2'-O-methyladenosine-3'-phosphate
  modified_base 21: mod_base = OTHER; note = 2'-O-methylguanosine-3'- phosphorothioate
  modified_base 22: mod_base = OTHER; note = 2'-O-methylcytidine-3'- phosphorothioate
  modified_base 23: mod_base = OTHER; note = 2'-O-methylcytidine-3'-phosphate
taggcatgttcagtgaaggagcc

SEQ ID NO: 3820 - RNA, 23 nt, synthetic construct
  misc_feature 1..23: note = Description of Artificial Sequence: Synthetic oligonucleotide
  source 1..23: mol_type = other RNA
  modified_base 1: mod_base = OTHER; note = 2'-O-methyladenosine-3'- phosphorothioate
  modified_base 2: mod_base = OTHER; note = 2'-fluoroadenosine-3'-phosphorothioate
  modified_base 3: mod_base = OTHER; note = 2'-O-methyladenosine-3'-phosphate
  modified_base 4: mod_base = OTHER; note = 2'-O-methyladenosine-3'-phosphate
  modified_base 5: mod_base = OTHER; note = 2'-O-methyladenosine-3'-phosphate
  modified_base 6: mod_base = OTHER; note = 2'-fluorouridine-3'-phosphate
  modified_base 7: mod_base = OTHER; note = 2'-O-methylguanosine-3'-phosphate
  modified_base 8: mod_base = OTHER; note = 2'-fluorouridine-3'-phosphate
  modified_base 9: mod_base = OTHER; note = 2'-fluorouridine-3'-phosphate
  modified_base 10: mod_base = OTHER; note = 2'-O-methylguanosine-3'-phosphate
  modified_base 11: mod_base = OTHER; note = 2'-O-methylguanosine-3'-phosphate
  modified_base 12: mod_base = OTHER; note = 2'-O-methyladenosine-3'-phosphate
  modified_base 13: mod_base = OTHER; note = 2'-O-methylcytidine-3'-phosphate
  modified_base 14: mod_base = OTHER; note = 2'-fluorouridine-3'-phosphate
  modified_base 15: mod_base = OTHER; note = 2'-O-methyladenosine-3'-phosphate
  modified_base 16: mod_base = OTHER; note = 2'-fluoroguanosine-3'-phosphate
  modified_base 17: mod_base = OTHER; note = 2'-O-methylguanosine-3'-phosphate
  modified_base 18: mod_base = OTHER; note = 2'-O-methylcytidine-3'-phosphate
  modified_base 19: mod_base = OTHER; note = 2'-O-methyladenosine-3'-phosphate
  modified_base 20: mod_base = OTHER; note = 2'-O-methyluridine-3'-phosphate
  modified_base 21: mod_base = OTHER; note = 2'-O-methylguanosine-3'- phosphorothioate
  modified_base 22: mod_base = OTHER; note = 2'-O-methyluridine-3'-phosphorothioate
  modified_base 23: mod_base = OTHER; note = 2'-O-methyluridine-3'-phosphate
aaaaatgttggactaggcatgtt

SEQ ID NO: 3821 - RNA, 23 nt, synthetic construct
  misc_feature 1..23: note = Description of Artificial Sequence: Synthetic oligonucleotide
  source 1..23: mol_type = other RNA
  modified_base 1: mod_base = OTHER; note = 2'-O-methyluridine-3'-phosphorothioate
  modified_base 2: mod_base = OTHER; note = 2'-fluorouridine -3'-phosphorothioate
  modified_base 3: mod_base = OTHER; note = 2'-O-methylcytidine-3'-phosphate
  modified_base 4: mod_base = OTHER; note = 2'-O-methyladenosine-3'-phosphate
  modified_base 5: mod_base = OTHER; note = 2'-O-methyluridine-3'-phosphate
  modified_base 6: mod_base = OTHER; note = 2'-fluorouridine-3'-phosphate
  modified_base 7: mod_base = OTHER; note = 2'-O-methyladenosine-3'-phosphate
  modified_base 8: mod_base = OTHER; note = 2'-fluoroadenosine-3'-phosphate
  modified_base 9: mod_base = OTHER; note = 2'-fluoroguanosine-3'-phosphate
  modified_base 10: mod_base = OTHER; note = 2'-O-methyladenosine-3'-phosphate
  modified_base 11: mod_base = OTHER; note = 2'-O-methyluridine-3'-phosphate
  modified_base 12: mod_base = OTHER; note = 2'-O-methyladenosine-3'-phosphate
  modified_base 13: mod_base = OTHER; note = 2'-O-methylcytidine-3'-phosphate
  modified_base 14: mod_base = OTHER; note = 2'-fluorouridine-3'-phosphate
  modified_base 15: mod_base = OTHER; note = 2'-O-methylguanosine-3'-phosphate
  modified_base 16: mod_base = OTHER; note = 2'-fluoroadenosine-3'-phosphate
  modified_base 17: mod_base = OTHER; note = 2'-O-methyluridine-3'-phosphate
  modified_base 18: mod_base = OTHER; note = 2'-O-methylguanosine-3'-phosphate
  modified_base 19: mod_base = OTHER; note = 2'-O-methylguanosine-3'-phosphate
  modified_base 20: mod_base = OTHER; note = 2'-O-methylcytidine-3'-phosphate
  modified_base 21: mod_base = OTHER; note = 2'-O-methyladenosine-3'- phosphorothioate
  modified_base 22: mod_base = OTHER; note = 2'-O-methylcytidine-3'- phosphorothioate
  modified_base 23: mod_base = OTHER; note = 2'-O-methyladenosine-3'-phosphate
ttcattaagatactgatggcaca

SEQ ID NO: 3822 - RNA, 23 nt, synthetic construct
  misc_feature 1..23: note = Description of Artificial Sequence: Synthetic oligonucleotide
  source 1..23: mol_type = other RNA
  modified_base 1: mod_base = OTHER; note = 2'-O-methyluridine-3'-phosphorothioate
  modified_base 2: mod_base = OTHER; note = 2'-fluorouridine -3'-phosphorothioate
  modified_base 3: mod_base = OTHER; note = 2'-O-methyluridine-3'-phosphate
  modified_base 4: mod_base = OTHER; note = 2'-O-methylcytidine-3'-phosphate
  modified_base 5: mod_base = OTHER; note = 2'-O-methyladenosine-3'-phosphate
  modified_base 6: mod_base = OTHER; note = 2'-fluorouridine-3'-phosphate
  modified_base 7: mod_base = OTHER; note = 2'-O-methyluridine-3'-phosphate
  modified_base 8: mod_base = OTHER; note = 2'-fluoroadenosine-3'-phosphate
  modified_base 9: mod_base = OTHER; note = 2'-fluoroadenosine-3'-phosphate
  modified_base 10: mod_base = OTHER; note = 2'-O-methylguanosine-3'-phosphate
  modified_base 11: mod_base = OTHER; note = 2'-O-methyladenosine-3'-phosphate
  modified_base 12: mod_base = OTHER; note = 2'-O-methyluridine-3'-phosphate
  modified_base 13: mod_base = OTHER; note = 2'-O-methyladenosine-3'-phosphate
  modified_base 14: mod_base = OTHER; note = 2'-fluorocytidine-3'-phosphate
  modified_base 15: mod_base = OTHER; note = 2'-O-methyluridine-3'-phosphate
  modified_base 16: mod_base = OTHER; note = 2'-fluoroguanosine-3'-phosphate
  modified_base 17: mod_base = OTHER; note = 2'-O-methyladenosine-3'-phosphate
  modified_base 18: mod_base = OTHER; note = 2'-O-methyluridine-3'-phosphate
  modified_base 19: mod_base = OTHER; note = 2'-O-methylguanosine-3'-phosphate
  modified_base 20: mod_base = OTHER; note = 2'-O-methylguanosine-3'-phosphate
  modified_base 21: mod_base = OTHER; note = 2'-O-methylcytidine-3'- phosphorothioate
  modified_base 22: mod_base = OTHER; note = 2'-O-methyladenosine-3'- phosphorothioate
  modified_base 23: mod_base = OTHER; note = 2'-O-methylcytidine-3'-phosphate
tttcattaagatactgatggcac

SEQ ID NO: 3823 - RNA, 23 nt, synthetic construct
  misc_feature 1..23: note = Description of Artificial Sequence: Synthetic oligonucleotide
  source 1..23: mol_type = other RNA
  modified_base 1: mod_base = OTHER; note = 2'-O-methyladenosine-3'- phosphorothioate
  modified_base 2: mod_base = OTHER; note = 2'-fluoroguanosine-3'-phosphorothioate
  modified_base 3: mod_base = OTHER; note = 2'-O-methyladenosine-3'-phosphate
  modified_base 4: mod_base = OTHER; note = 2'-O-methylcytidine-3'-phosphate
  modified_base 5: mod_base = OTHER; note = 2'-O-methyladenosine-3'-phosphate
  modified_base 6: mod_base = OTHER; note = 2'-fluoroadenosine-3'-phosphate
  modified_base 7: mod_base = OTHER; note = 2'-O-methyluridine-3'-phosphate
  modified_base 8: mod_base = OTHER; note = 2'-fluorocytidine-3'-phosphate
  modified_base 9: mod_base = OTHER; note = 2'-fluorouridine-3'-phosphate
  modified_base 10: mod_base = OTHER; note = 2'-O-methyluridine-3'-phosphate
  modified_base 11: mod_base = OTHER; note = 2'-O-methyluridine-3'-phosphate
  modified_base 12: mod_base = OTHER; note = 2'-O-methylguanosine-3'-phosphate
  modified_base 13: mod_base = OTHER; note = 2'-O-methylguanosine-3'-phosphate
  modified_base 14: mod_base = OTHER; note = 2'-fluorouridine-3'-phosphate
  modified_base 15: mod_base = OTHER; note = 2'-O-methylguanosine-3'-phosphate
  modified_base 16: mod_base = OTHER; note = 2'-fluorouridine-3'-phosphate
  modified_base 17: mod_base = OTHER; note = 2'-O-methyluridine-3'-phosphate
  modified_base 18: mod_base = OTHER; note = 2'-O-methylcytidine-3'-phosphate
  modified_base 19: mod_base = OTHER; note = 2'-O-methyluridine-3'-phosphate
  modified_base 20: mod_base = OTHER; note = 2'-O-methyladenosine-3'-phosphate
  modified_base 21: mod_base = OTHER; note = 2'-O-methyladenosine-3'- phosphorothioate
  modified_base 22: mod_base = OTHER; note = 2'-O-methylguanosine-3'- phosphorothioate
  modified_base 23: mod_base = OTHER; note = 2'-O-methylguanosine-3'-phosphate
agacaatctttggtgttctaagg

SEQ ID NO: 3824 - RNA, 23 nt, synthetic construct
  misc_feature 1..23: note = Description of Artificial Sequence: Synthetic oligonucleotide
  source 1..23: mol_type = other RNA
  modified_base 1: mod_base = OTHER; note = 2'-O-methyluridine-3'-phosphorothioate
  modified_base 2: mod_base = OTHER; note = 2'-fluoroadenosine-3'-phosphorothioate
  modified_base 3: mod_base = OTHER; note = 2'-O-methylguanosine-3'-phosphate
  modified_base 4: mod_base = OTHER; note = 2'-O-methylcytidine-3'-phosphate
  modified_base 5: mod_base = OTHER; note = 2'-O-methylcytidine-3'-phosphate
  modified_base 6: mod_base = OTHER; note = 2'-fluorouridine-3'-phosphate
  modified_base 7: mod_base = OTHER; note = 2'-O-methyladenosine-3'-phosphate
  modified_base 8: mod_base = OTHER; note = 2'-fluoroguanosine-3'-phosphate
  modified_base 9: mod_base = OTHER; note = 2'-fluoroadenosine-3'-phosphate
  modified_base 10: mod_base = OTHER; note = 2'-O-methylcytidine-3'-phosphate
  modified_base 11: mod_base = OTHER; note = 2'-O-methyladenosine-3'-phosphate
  modified_base 12: mod_base = OTHER; note = 2'-O-methylguanosine-3'-phosphate
  modified_base 13: mod_base = OTHER; note = 2'-O-methyluridine-3'-phosphate
  modified_base 14: mod_base = OTHER; note = 2'-fluoroguanosine-3'-phosphate
  modified_base 15: mod_base = OTHER; note = 2'-O-methyladenosine-3'-phosphate
  modified_base 16: mod_base = OTHER; note = 2'-fluoroadenosine-3'-phosphate
  modified_base 17: mod_base = OTHER; note = 2'-O-methyladenosine-3'-phosphate
  modified_base 18: mod_base = OTHER; note = 2'-O-methyluridine-3'-phosphate
  modified_base 19: mod_base = OTHER; note = 2'-O-methylguanosine-3'-phosphate
  modified_base 20: mod_base = OTHER; note = 2'-O-methyladenosine-3'-phosphate
  modified_base 21: mod_base = OTHER; note = 2'-O-methyluridine-3'-phosphorothioate
  modified_base 22: mod_base = OTHER; note = 2'-O-methyladenosine-3'- phosphorothioate
  modified_base 23: mod_base = OTHER; note = 2'-O-methyluridine-3'-phosphate
tagcctagacagtgaaatgatat

SEQ ID NO: 3825 - RNA, 23 nt, synthetic construct
  misc_feature 1..23: note = Description of Artificial Sequence: Synthetic oligonucleotide
  source 1..23: mol_type = other RNA
  modified_base 1: mod_base = OTHER; note = 2'-O-methyluridine-3'-phosphorothioate
  modified_base 2: mod_base = OTHER; note = 2'-fluorouridine -3'-phosphorothioate
  modified_base 3: mod_base = OTHER; note = 2'-O-methylguanosine-3'-phosphate
  modified_base 4: mod_base = OTHER; note = 2'-O-methyluridine-3'-phosphate
  modified_base 5: mod_base = OTHER; note = 2'-O-methyluridine-3'-phosphate
  modified_base 6: mod_base = OTHER; note = 2'-fluoroguanosine-3'-phosphate
  modified_base 7: mod_base = OTHER; note = 2'-O-methyluridine-3'-phosphate
  modified_base 8: mod_base = OTHER; note = 2'-fluoroadenosine-3'-phosphate
  modified_base 9: mod_base = OTHER; note = 2'-fluoroguanosine-3'-phosphate
  modified_base 10: mod_base = OTHER; note = 2'-O-methylcytidine-3'-phosphate
  modified_base 11: mod_base = OTHER; note = 2'-O-methylcytidine-3'-phosphate
  modified_base 12: mod_base = OTHER; note = 2'-O-methyluridine-3'-phosphate
  modified_base 13: mod_base = OTHER; note = 2'-O-methyladenosine-3'-phosphate
  modified_base 14: mod_base = OTHER; note = 2'-fluoroguanosine-3'-phosphate
  modified_base 15: mod_base = OTHER; note = 2'-O-methyladenosine-3'-phosphate
  modified_base 16: mod_base = OTHER; note = 2'-fluorocytidine-3'-phosphate
  modified_base 17: mod_base = OTHER; note = 2'-O-methyladenosine-3'-phosphate
  modified_base 18: mod_base = OTHER; note = 2'-O-methylguanosine-3'-phosphate
  modified_base 19: mod_base = OTHER; note = 2'-O-methyluridine-3'-phosphate
  modified_base 20: mod_base = OTHER; note = 2'-O-methylguanosine-3'-phosphate
  modified_base 21: mod_base = OTHER; note = 2'-O-methyladenosine-3'- phosphorothioate
  modified_base 22: mod_base = OTHER; note = 2'-O-methyladenosine-3'- phosphorothioate
  modified_base 23: mod_base = OTHER; note = 2'-O-methyladenosine-3'-phosphate
ttgttgtagcctagacagtgaaa

SEQ ID NO: 3826 - RNA, 23 nt, synthetic construct
  misc_feature 1..23: note = Description of Artificial Sequence: Synthetic oligonucleotide
  source 1..23: mol_type = other RNA
  modified_base 1: mod_base = OTHER; note = 2'-O-methyluridine-3'-phosphorothioate
  modified_base 2: mod_base = OTHER; note = 2'-fluorouridine -3'-phosphorothioate
  modified_base 3: mod_base = OTHER; note = 2'-O-methylguanosine-3'-phosphate
  modified_base 4: mod_base = OTHER; note = 2'-O-methylguanosine-3'-phosphate
  modified_base 5: mod_base = OTHER; note = 2'-O-methyladenosine-3'-phosphate
  modified_base 6: mod_base = OTHER; note = 2'-fluorouridine-3'-phosphate
  modified_base 7: mod_base = OTHER; note = 2'-O-methyluridine-3'-phosphate
  modified_base 8: mod_base = OTHER; note = 2'-fluorouridine-3'-phosphate
  modified_base 9: mod_base = OTHER; note = 2'-fluoroadenosine-3'-phosphate
  modified_base 10: mod_base = OTHER; note = 2'-O-methyluridine-3'-phosphate
  modified_base 11: mod_base = OTHER; note = 2'-O-methyladenosine-3'-phosphate
  modified_base 12: mod_base = OTHER; note = 2'-O-methylcytidine-3'-phosphate
  modified_base 13: mod_base = OTHER; note = 2'-O-methyladenosine-3'-phosphate
  modified_base 14: mod_base = OTHER; note = 2'-fluorocytidine-3'-phosphate
  modified_base 15: mod_base = OTHER; note = 2'-O-methyluridine-3'-phosphate
  modified_base 16: mod_base = OTHER; note = 2'-fluoroguanosine-3'-phosphate
  modified_base 17: mod_base = OTHER; note = 2'-O-methylguanosine-3'-phosphate
  modified_base 18: mod_base = OTHER; note = 2'-O-methyladenosine-3'-phosphate
  modified_base 19: mod_base = OTHER; note = 2'-O-methyluridine-3'-phosphate
  modified_base 20: mod_base = OTHER; note = 2'-O-methylcytidine-3'-phosphate
  modified_base 21: mod_base = OTHER; note = 2'-O-methylcytidine-3'- phosphorothioate
  modified_base 22: mod_base = OTHER; note = 2'-O-methylcytidine-3'- phosphorothioate
  modified_base 23: mod_base = OTHER; note = 2'-O-methyladenosine-3'-phosphate
ttggatttatacactggatccca

SEQ ID NO: 3827 - RNA, 23 nt, synthetic construct
  misc_feature 1..23: note = Description of Artificial Sequence: Synthetic oligonucleotide
  source 1..23: mol_type = other RNA
  modified_base 1: mod_base = OTHER; note = 2'-O-methyluridine-3'-phosphorothioate
  modified_base 2: mod_base = OTHER; note = 2'-fluoroguanosine-3'-phosphorothioate
  modified_base 3: mod_base = OTHER; note = 2'-O-methyluridine-3'-phosphate
  modified_base 4: mod_base = OTHER; note = 2'-O-methyladenosine-3'-phosphate
  modified_base 5: mod_base = OTHER; note = 2'-O-methyluridine-3'-phosphate
  modified_base 6: mod_base = OTHER; note = 2'-fluoroadenosine-3'-phosphate
  modified_base 7: mod_base = OTHER; note = 2'-O-methyladenosine-3'-phosphate
  modified_base 8: mod_base = OTHER; note = 2'-fluorocytidine-3'-phosphate
  modified_base 9: mod_base = OTHER; note = 2'-fluoroadenosine-3'-phosphate
  modified_base 10: mod_base = OTHER; note = 2'-O-methylcytidine-3'-phosphate
  modified_base 11: mod_base = OTHER; note = 2'-O-methyluridine-3'-phosphate
  modified_base 12: mod_base = OTHER; note = 2'-O-methyluridine-3'-phosphate
  modified_base 13: mod_base = OTHER; note = 2'-O-methylguanosine-3'-phosphate
  modified_base 14: mod_base = OTHER; note = 2'-fluoroguanosine-3'-phosphate
  modified_base 15: mod_base = OTHER; note = 2'-O-methyladenosine-3'-phosphate
  modified_base 16: mod_base = OTHER; note = 2'-fluorouridine-3'-phosphate
  modified_base 17: mod_base = OTHER; note = 2'-O-methyladenosine-3'-phosphate
  modified_base 18: mod_base = OTHER; note = 2'-O-methylguanosine-3'-phosphate
  modified_base 19: mod_base = OTHER; note = 2'-O-methyluridine-3'-phosphate
  modified_base 20: mod_base = OTHER; note = 2'-O-methyluridine-3'-phosphate
  modified_base 21: mod_base = OTHER; note = 2'-O-methylguanosine-3'- phosphorothioate
  modified_base 22: mod_base = OTHER; note = 2'-O-methylguanosine-3'- phosphorothioate
  modified_base 23: mod_base = OTHER; note = 2'-O-methyluridine-3'-phosphate
tgtataacacttggatagttggt

SEQ ID NO: 3828 - RNA, 23 nt, synthetic construct
  misc_feature 1..23: note = Description of Artificial Sequence: Synthetic oligonucleotide
  source 1..23: mol_type = other RNA
  modified_base 1: mod_base = OTHER; note = 2'-O-methyluridine-3'-phosphorothioate
  modified_base 2: mod_base = OTHER; note = 2'-fluorocytidine-3'-phosphorothioate
  modified_base 3: mod_base = OTHER; note = 2'-O-methyladenosine-3'-phosphate
  modified_base 4: mod_base = OTHER; note = 2'-O-methyluridine-3'-phosphate
  modified_base 5: mod_base = OTHER; note = 2'-O-methyladenosine-3'-phosphate
  modified_base 6: mod_base = OTHER; note = 2'-fluorouridine-3'-phosphate
  modified_base 7: mod_base = OTHER; note = 2'-O-methyluridine-3'-phosphate
  modified_base 8: mod_base = OTHER; note = 2'-fluoroguanosine-3'-phosphate
  modified_base 9: mod_base = OTHER; note = 2'-fluoroguanosine-3'-phosphate
  modified_base 10: mod_base = OTHER; note = 2'-O-methyladenosine-3'-phosphate
  modified_base 11: mod_base = OTHER; note = 2'-O-methylcytidine-3'-phosphate
  modified_base 12: mod_base = OTHER; note = 2'-O-methyluridine-3'-phosphate
  modified_base 13: mod_base = OTHER; note = 2'-O-methyluridine-3'-phosphate
  modified_base 14: mod_base = OTHER; note = 2'-fluoroguanosine-3'-phosphate
  modified_base 15: mod_base = OTHER; note = 2'-O-methylguanosine-3'-phosphate
  modified_base 16: mod_base = OTHER; note = 2'-fluoroadenosine-3'-phosphate
  modified_base 17: mod_base = OTHER; note = 2'-O-methyladenosine-3'-phosphate
  modified_base 18: mod_base = OTHER; note = 2'-O-methylcytidine-3'-phosphate
  modified_base 19: mod_base = OTHER; note = 2'-O-methylcytidine-3'-phosphate
  modified_base 20: mod_base = OTHER; note = 2'-O-methyladenosine-3'-phosphate
  modified_base 21: mod_base = OTHER; note = 2'-O-methyladenosine-3'- phosphorothioate
  modified_base 22: mod_base = OTHER; note = 2'-O-methyladenosine-3'- phosphorothioate
  modified_base 23: mod_base = OTHER; note = 2'-O-methyladenosine-3'-phosphate
tcatattggacttggaaccaaaa

SEQ ID NO: 3829 - RNA, 23 nt, synthetic construct
  misc_feature 1..23: note = Description of Artificial Sequence: Synthetic oligonucleotide
  source 1..23: mol_type = other RNA
  modified_base 1: mod_base = OTHER; note = 2'-O-methyladenosine-3'- phosphorothioate
  modified_base 2: mod_base = OTHER; note = 2'-fluoroguanosine-3'-phosphorothioate
  modified_base 3: mod_base = OTHER; note = 2'-O-methyluridine-3'-phosphate
  modified_base 4: mod_base = OTHER; note = 2'-O-methyluridine-3'-phosphate
  modified_base 5: mod_base = OTHER; note = 2'-O-methyluridine-3'-phosphate
  modified_base 6: mod_base = OTHER; note = 2'-fluoroguanosine-3'-phosphate
  modified_base 7: mod_base = OTHER; note = 2'-O-methyladenosine-3'-phosphate
  modified_base 8: mod_base = OTHER; note = 2'-fluorouridine-3'-phosphate
  modified_base 9: mod_base = OTHER; note = 2'-fluorocytidine-3'-phosphate
  modified_base 10: mod_base = OTHER; note = 2'-O-methyladenosine-3'-phosphate
  modified_base 11: mod_base = OTHER; note = 2'-O-methylcytidine-3'-phosphate
  modified_base 12: mod_base = OTHER; note = 2'-O-methylcytidine-3'-phosphate
  modified_base 13: mod_base = OTHER; note = 2'-O-methyluridine-3'-phosphate
  modified_base 14: mod_base = OTHER; note = 2'-fluorocytidine-3'-phosphate
  modified_base 15: mod_base = OTHER; note = 2'-O-methyladenosine-3'-phosphate
  modified_base 16: mod_base = OTHER; note = 2'-fluorouridine-3'-phosphate
  modified_base 17: mod_base = OTHER; note = 2'-O-methyladenosine-3'-phosphate
  modified_base 18: mod_base = OTHER; note = 2'-O-methyladenosine-3'-phosphate
  modified_base 19: mod_base = OTHER; note = 2'-O-methylguanosine-3'-phosphate
  modified_base 20: mod_base = OTHER; note = 2'-O-methylcytidine-3'-phosphate
  modified_base 21: mod_base = OTHER; note = 2'-O-methyladenosine-3'- phosphorothioate
  modified_base 22: mod_base = OTHER; note = 2'-O-methylcytidine-3'- phosphorothioate
  modified_base 23: mod_base = OTHER; note = 2'-O-methyluridine-3'-phosphate
agtttgatcacctcataagcact

SEQ ID NO: 3830 - RNA, 23 nt, synthetic construct
  misc_feature 1..23: note = Description of Artificial Sequence: Synthetic oligonucleotide
  source 1..23: mol_type = other RNA
  modified_base 1: mod_base = OTHER; note = 2'-O-methyluridine-3'-phosphorothioate
  modified_base 2: mod_base = OTHER; note = 2'-fluoroguanosine-3'-phosphorothioate
  modified_base 3: mod_base = OTHER; note = 2'-O-methyladenosine-3'-phosphate
  modified_base 4: mod_base = OTHER; note = 2'-O-methyluridine-3'-phosphate
  modified_base 5: mod_base = OTHER; note = 2'-O-methylguanosine-3'-phosphate
  modified_base 6: mod_base = OTHER; note = 2'-fluorouridine-3'-phosphate
  modified_base 7: mod_base = OTHER; note = 2'-O-methylguanosine-3'-phosphate
  modified_base 8: mod_base = OTHER; note = 2'-fluorouridine-3'-phosphate
  modified_base 9: mod_base = OTHER; note = 2'-fluoroadenosine-3'-phosphate
  modified_base 10: mod_base = OTHER; note = 2'-O-methylguanosine-3'-phosphate
  modified_base 11: mod_base = OTHER; note = 2'-O-methylcytidine-3'-phosphate
  modified_base 12: mod_base = OTHER; note = 2'-O-methylcytidine-3'-phosphate
  modified_base 13: mod_base = OTHER; note = 2'-O-methyluridine-3'-phosphate
  modified_base 14: mod_base = OTHER; note = 2'-fluorouridine-3'-phosphate
  modified_base 15: mod_base = OTHER; note = 2'-O-methyluridine-3'-phosphate
  modified_base 16: mod_base = OTHER; note = 2'-fluoroguanosine-3'-phosphate
  modified_base 17: mod_base = OTHER; note = 2'-O-methyladenosine-3'-phosphate
  modified_base 18: mod_base = OTHER; note = 2'-O-methylguanosine-3'-phosphate
  modified_base 19: mod_base = OTHER; note = 2'-O-methyluridine-3'-phosphate
  modified_base 20: mod_base = OTHER; note = 2'-O-methyluridine-3'-phosphate
  modified_base 21: mod_base = OTHER; note = 2'-O-methyluridine-3'-phosphorothioate
  modified_base 22: mod_base = OTHER; note = 2'-O-methylguanosine-3'- phosphorothioate
  modified_base 23: mod_base = OTHER; note = 2'-O-methyladenosine-3'-phosphate
tgatgtgtagcctttgagtttga

SEQ ID NO: 3831 - RNA, 23 nt, synthetic construct
  misc_feature 1..23: note = Description of Artificial Sequence: Synthetic oligonucleotide
  source 1..23: mol_type = other RNA
  modified_base 1: mod_base = OTHER; note = 2'-O-methyluridine-3'-phosphorothioate
  modified_base 2: mod_base = OTHER; note = 2'-fluorocytidine-3'-phosphorothioate
  modified_base 3: mod_base = OTHER; note = 2'-O-methyladenosine-3'-phosphate
  modified_base 4: mod_base = OTHER; note = 2'-O-methylcytidine-3'-phosphate
  modified_base 5: mod_base = OTHER; note = 2'-O-methylcytidine-3'-phosphate
  modified_base 6: mod_base = OTHER; note = 2'-fluorouridine-3'-phosphate
  modified_base 7: mod_base = OTHER; note = 2'-O-methyluridine-3'-phosphate
  modified_base 8: mod_base = OTHER; note = 2'-fluorocytidine-3'-phosphate
  modified_base 9: mod_base = OTHER; note = 2'-fluoroadenosine-3'-phosphate
  modified_base 10: mod_base = OTHER; note = 2'-O-methylcytidine-3'-phosphate
  modified_base 11: mod_base = OTHER; note = 2'-O-methyladenosine-3'-phosphate
  modified_base 12: mod_base = OTHER; note = 2'-O-methyladenosine-3'-phosphate
  modified_base 13: mod_base = OTHER; note = 2'-O-methylguanosine-3'-phosphate
  modified_base 14: mod_base = OTHER; note = 2'-fluoroguanosine-3'-phosphate
  modified_base 15: mod_base = OTHER; note = 2'-O-methyluridine-3'-phosphate
  modified_base 16: mod_base = OTHER; note = 2'-fluorocytidine-3'-phosphate
  modified_base 17: mod_base = OTHER; note = 2'-O-methyluridine-3'-phosphate
  modified_base 18: mod_base = OTHER; note = 2'-O-methylguanosine-3'-phosphate
  modified_base 19: mod_base = OTHER; note = 2'-O-methyladenosine-3'-phosphate
  modified_base 20: mod_base = OTHER; note = 2'-O-methylguanosine-3'-phosphate
  modified_base 21: mod_base = OTHER; note = 2'-O-methyladenosine-3'- phosphorothioate
  modified_base 22: mod_base = OTHER; note = 2'-O-methyluridine-3'-phosphorothioate
  modified_base 23: mod_base = OTHER; note = 2'-O-methyluridine-3'-phosphate
tcaccttcacaaggtctgagatt

SEQ ID NO: 3832 - RNA, 23 nt, synthetic construct
  misc_feature 1..23: note = Description of Artificial Sequence: Synthetic oligonucleotide
  source 1..23: mol_type = other RNA
  modified_base 1: mod_base = OTHER; note = 2'-O-methyladenosine-3'- phosphorothioate
  modified_base 2: mod_base = OTHER; note = 2'-fluoroguanosine-3'-phosphorothioate
  modified_base 3: mod_base = OTHER; note = 2'-O-methylguanosine-3'-phosphate
  modified_base 4: mod_base = OTHER; note = 2'-O-methyladenosine-3'-phosphate
  modified_base 5: mod_base = OTHER; note = 2'-O-methyluridine-3'-phosphate
  modified_base 6: mod_base = OTHER; note = 2'-fluoroadenosine-3'-phosphate
  modified_base 7: mod_base = OTHER; note = 2'-O-methyluridine-3'-phosphate
  modified_base 8: mod_base = OTHER; note = 2'-fluoroadenosine-3'-phosphate
  modified_base 9: mod_base = OTHER; note = 2'-fluoroguanosine-3'-phosphate
  modified_base 10: mod_base = OTHER; note = 2'-O-methylcytidine-3'-phosphate
  modified_base 11: mod_base = OTHER; note = 2'-O-methyluridine-3'-phosphate
  modified_base 12: mod_base = OTHER; note = 2'-O-methylguanosine-3'-phosphate
  modified_base 13: mod_base = OTHER; note = 2'-O-methyluridine-3'-phosphate
  modified_base 14: mod_base = OTHER; note = 2'-fluoroguanosine-3'-phosphate
  modified_base 15: mod_base = OTHER; note = 2'-O-methylguanosine-3'-phosphate
  modified_base 16: mod_base = OTHER; note = 2'-fluoroadenosine-3'-phosphate
  modified_base 17: mod_base = OTHER; note = 2'-O-methyluridine-3'-phosphate
  modified_base 18: mod_base = OTHER; note = 2'-O-methyluridine-3'-phosphate
  modified_base 19: mod_base = OTHER; note = 2'-O-methyluridine-3'-phosphate
  modified_base 20: mod_base = OTHER; note = 2'-O-methyluridine-3'-phosphate
  modified_base 21: mod_base = OTHER; note = 2'-O-methyladenosine-3'- phosphorothioate
  modified_base 22: mod_base = OTHER; note = 2'-O-methylcytidine-3'- phosphorothioate
  modified_base 23: mod_base = OTHER; note = 2'-O-methyladenosine-3'-phosphate
aggatatagctgtggattttaca

SEQ ID NO: 3833 - RNA, 23 nt, synthetic construct
  misc_feature 1..23: note = Description of Artificial Sequence: Synthetic oligonucleotide
  source 1..23: mol_type = other RNA
  modified_base 1: mod_base = OTHER; note = 2'-O-methyladenosine-3'- phosphorothioate
  modified_base 2: mod_base = OTHER; note = 2'-fluorocytidine-3'-phosphorothioate
  modified_base 3: mod_base = OTHER; note = 2'-O-methyluridine-3'-phosphate
  modified_base 4: mod_base = OTHER; note = 2'-O-methyladenosine-3'-phosphate
  modified_base 5: mod_base = OTHER; note = 2'-O-methylguanosine-3'-phosphate
  modified_base 6: mod_base = OTHER; note = 2'-fluoroguanosine-3'-phosphate
  modified_base 7: mod_base = OTHER; note = 2'-O-methylcytidine-3'-phosphate
  modified_base 8: mod_base = OTHER; note = 2'-fluoroadenosine-3'-phosphate
  modified_base 9: mod_base = OTHER; note = 2'-fluorouridine-3'-phosphate
  modified_base 10: mod_base = OTHER; note = 2'-O-methylguanosine-3'-phosphate
  modified_base 11: mod_base = OTHER; note = 2'-O-methyluridine-3'-phosphate
  modified_base 12: mod_base = OTHER; note = 2'-O-methyluridine-3'-phosphate
  modified_base 13: mod_base = OTHER; note = 2'-O-methylcytidine-3'-phosphate
  modified_base 14: mod_base = OTHER; note = 2'-fluoroadenosine-3'-phosphate
  modified_base 15: mod_base = OTHER; note = 2'-O-methylguanosine-3'-phosphate
  modified_base 16: mod_base = OTHER; note = 2'-fluorouridine-3'-phosphate
  modified_base 17: mod_base = OTHER; note = 2'-O-methylguanosine-3'-phosphate
  modified_base 18: mod_base = OTHER; note = 2'-O-methyladenosine-3'-phosphate
  modified_base 19: mod_base = OTHER; note = 2'-O-methyladenosine-3'-phosphate
  modified_base 20: mod_base = OTHER; note = 2'-O-methylguanosine-3'-phosphate
  modified_base 21: mod_base = OTHER; note = 2'-O-methylguanosine-3'- phosphorothioate
  modified_base 22: mod_base = OTHER; note = 2'-O-methyladenosine-3'- phosphorothioate
  modified_base 23: mod_base = OTHER; note = 2'-O-methylguanosine-3'-phosphate
actaggcatgttcagtgaaggag

SEQ ID NO: 3834 - RNA, 23 nt, synthetic construct
  misc_feature 1..23: note = Description of Artificial Sequence: Synthetic oligonucleotide
  source 1..23: mol_type = other RNA
  modified_base 1: mod_base = OTHER; note = 2'-O-methyluridine-3'-phosphorothioate
  modified_base 2: mod_base = OTHER; note = 2'-fluoroguanosine-3'-phosphorothioate
  modified_base 3: mod_base = OTHER; note = 2'-O-methylguanosine-3'-phosphate
  modified_base 4: mod_base = OTHER; note = 2'-O-methyladenosine-3'-phosphate
  modified_base 5: mod_base = OTHER; note = 2'-O-methyluridine-3'-phosphate
  modified_base 6: mod_base = OTHER; note = 2'-fluorouridine-3'-phosphate
  modified_base 7: mod_base = OTHER; note = 2'-O-methyluridine-3'-phosphate
  modified_base 8: mod_base = OTHER; note = 2'-fluoroadenosine-3'-phosphate
  modified_base 9: mod_base = OTHER; note = 2'-fluorouridine-3'-phosphate
  modified_base 10: mod_base = OTHER; note = 2'-O-methyladenosine-3'-phosphate
  modified_base 11: mod_base = OTHER; note = 2'-O-methylcytidine-3'-phosphate
  modified_base 12: mod_base = OTHER; note = 2'-O-methyladenosine-3'-phosphate
  modified_base 13: mod_base = OTHER; note = 2'-O-methylcytidine-3'-phosphate
  modified_base 14: mod_base = OTHER; note = 2'-fluorouridine-3'-phosphate
  modified_base 15: mod_base = OTHER; note = 2'-O-methylguanosine-3'-phosphate
  modified_base 16: mod_base = OTHER; note = 2'-fluoroguanosine-3'-phosphate
  modified_base 17: mod_base = OTHER; note = 2'-O-methyladenosine-3'-phosphate
  modified_base 18: mod_base = OTHER; note = 2'-O-methyluridine-3'-phosphate
  modified_base 19: mod_base = OTHER; note = 2'-O-methylcytidine-3'-phosphate
  modified_base 20: mod_base = OTHER; note = 2'-O-methylcytidine-3'-phosphate
  modified_base 21: mod_base = OTHER; note = 2'-O-methylcytidine-3'- phosphorothioate
  modified_base 22: mod_base = OTHER; note = 2'-O-methyladenosine-3'- phosphorothioate
  modified_base 23: mod_base = OTHER; note = 2'-O-methylguanosine-3'-phosphate
tggatttatacactggatcccag

SEQ ID NO: 3835 - RNA, 23 nt, synthetic construct
  misc_feature 1..23: note = Description of Artificial Sequence: Synthetic oligonucleotide
  source 1..23: mol_type = other RNA
  modified_base 1: mod_base = OTHER; note = 2'-O-methyluridine-3'-phosphorothioate
  modified_base 2: mod_base = OTHER; note = 2'-fluorouridine -3'-phosphorothioate
  modified_base 3: mod_base = OTHER; note = 2'-O-methylcytidine-3'-phosphate
  modified_base 4: mod_base = OTHER; note = 2'-O-methyladenosine-3'-phosphate
  modified_base 5: mod_base = OTHER; note = 2'-O-methylcytidine-3'-phosphate
  modified_base 6: mod_base = OTHER; note = 2'-fluorouridine-3'-phosphate
  modified_base 7: mod_base = OTHER; note = 2'-O-methylguanosine-3'-phosphate
  modified_base 8: mod_base = OTHER; note = 2'-fluorouridine-3'-phosphate
  modified_base 9: mod_base = OTHER; note = 2'-fluorouridine-3'-phosphate
  modified_base 10: mod_base = OTHER; note = 2'-O-methylcytidine-3'-phosphate
  modified_base 11: mod_base = OTHER; note = 2'-O-methyladenosine-3'-phosphate
  modified_base 12: mod_base = OTHER; note = 2'-O-methyladenosine-3'-phosphate
  modified_base 13: mod_base = OTHER; note = 2'-O-methylguanosine-3'-phosphate
  modified_base 14: mod_base = OTHER; note = 2'-fluoroguanosine-3'-phosphate
  modified_base 15: mod_base = OTHER; note = 2'-O-methyluridine-3'-phosphate
  modified_base 16: mod_base = OTHER; note = 2'-fluorouridine-3'-phosphate
  modified_base 17: mod_base = OTHER; note = 2'-O-methyluridine-3'-phosphate
  modified_base 18: mod_base = OTHER; note = 2'-O-methyladenosine-3'-phosphate
  modified_base 19: mod_base = OTHER; note = 2'-O-methyluridine-3'-phosphate
  modified_base 20: mod_base = OTHER; note = 2'-O-methyluridine-3'-phosphate
  modified_base 21: mod_base = OTHER; note = 2'-O-methylguanosine-3'- phosphorothioate
  modified_base 22: mod_base = OTHER; note = 2'-O-methylguanosine-3'- phosphorothioate
  modified_base 23: mod_base = OTHER; note = 2'-O-methylguanosine-3'-phosphate
ttcactgttcaaggtttattggg

SEQ ID NO: 3836 - RNA, 23 nt, synthetic construct
  misc_feature 1..23: note = Description of Artificial Sequence: Synthetic oligonucleotide
  source 1..23: mol_type = other RNA
  modified_base 1: mod_base = OTHER; note = 2'-O-methyladenosine-3'- phosphorothioate
  modified_base 2: mod_base = OTHER; note = 2'-fluoroadenosine-3'-phosphorothioate
  modified_base 3: mod_base = OTHER; note = 2'-O-methylguanosine-3'-phosphate
  modified_base 4: mod_base = OTHER; note = 2'-O-methyladenosine-3'-phosphate
  modified_base 5: mod_base = OTHER; note = 2'-O-methyluridine-3'-phosphate
  modified_base 6: mod_base = OTHER; note = 2'-fluoroadenosine-3'-phosphate
  modified_base 7: mod_base = OTHER; note = 2'-O-methylcytidine-3'-phosphate
  modified_base 8: mod_base = OTHER; note = 2'-fluorouridine-3'-phosphate
  modified_base 9: mod_base = OTHER; note = 2'-fluoroguanosine-3'-phosphate
  modified_base 10: mod_base = OTHER; note = 2'-O-methyladenosine-3'-phosphate
  modified_base 11: mod_base = OTHER; note = 2'-O-methyluridine-3'-phosphate
  modified_base 12: mod_base = OTHER; note = 2'-O-methylguanosine-3'-phosphate
  modified_base 13: mod_base = OTHER; note = 2'-O-methylguanosine-3'-phosphate
  modified_base 14: mod_base = OTHER; note = 2'-fluorocytidine-3'-phosphate
  modified_base 15: mod_base = OTHER; note = 2'-O-methyladenosine-3'-phosphate
  modified_base 16: mod_base = OTHER; note = 2'-fluorocytidine-3'-phosphate
  modified_base 17: mod_base = OTHER; note = 2'-O-methyladenosine-3'-phosphate
  modified_base 18: mod_base = OTHER; note = 2'-O-methylguanosine-3'-phosphate
  modified_base 19: mod_base = OTHER; note = 2'-O-methylguanosine-3'-phosphate
  modified_base 20: mod_base = OTHER; note = 2'-O-methylcytidine-3'-phosphate
  modified_base 21: mod_base = OTHER; note = 2'-O-methylcytidine-3'- phosphorothioate
  modified_base 22: mod_base = OTHER; note = 2'-O-methyladenosine-3'- phosphorothioate
  modified_base 23: mod_base = OTHER; note = 2'-O-methyluridine-3'-phosphate
aagatactgatggcacaggccat

SEQ ID NO: 3837 - RNA, 23 nt, synthetic construct
  misc_feature 1..23: note = Description of Artificial Sequence: Synthetic oligonucleotide
  source 1..23: mol_type = other RNA
  modified_base 1: mod_base = OTHER; note = 2'-O-methyluridine-3'-phosphorothioate
  modified_base 2: mod_base = OTHER; note = 2'-fluoroguanosine-3'-phosphorothioate
  modified_base 3: mod_base = OTHER; note = 2'-O-methyluridine-3'-phosphate
  modified_base 4: mod_base = OTHER; note = 2'-O-methylcytidine-3'-phosphate
  modified_base 5: mod_base = OTHER; note = 2'-O-methyluridine-3'-phosphate
  modified_base 6: mod_base = OTHER; note = 2'-fluorouridine-3'-phosphate
  modified_base 7: mod_base = OTHER; note = 2'-O-methylcytidine-3'-phosphate
  modified_base 8: mod_base = OTHER; note = 2'-fluoroguanosine-3'-phosphate
  modified_base 9: mod_base = OTHER; note = 2'-fluoroadenosine-3'-phosphate
  modified_base 10: mod_base = OTHER; note = 2'-O-methyluridine-3'-phosphate
  modified_base 11: mod_base = OTHER; note = 2'-O-methylguanosine-3'-phosphate
  modified_base 12: mod_base = OTHER; note = 2'-O-methyladenosine-3'-phosphate
  modified_base 13: mod_base = OTHER; note = 2'-O-methylcytidine-3'-phosphate
  modified_base 14: mod_base = OTHER; note = 2'-fluoroadenosine-3'-phosphate
  modified_base 15: mod_base = OTHER; note = 2'-O-methyluridine-3'-phosphate
  modified_base 16: mod_base = OTHER; note = 2'-fluorocytidine-3'-phosphate
  modified_base 17: mod_base = OTHER; note = 2'-O-methyladenosine-3'-phosphate
  modified_base 18: mod_base = OTHER; note = 2'-O-methyladenosine-3'-phosphate
  modified_base 19: mod_base = OTHER; note = 2'-O-methylcytidine-3'-phosphate
  modified_base 20: mod_base = OTHER; note = 2'-O-methyladenosine-3'-phosphate
  modified_base 21: mod_base = OTHER; note = 2'-O-methyladenosine-3'- phosphorothioate
  modified_base 22: mod_base = OTHER; note = 2'-O-methylguanosine-3'- phosphorothioate
  modified_base 23: mod_base = OTHER; note = 2'-O-methyladenosine-3'-phosphate
tgtcttcgatgacatcaacaaga

SEQ ID NO: 3838 - RNA, 23 nt, synthetic construct
  misc_feature 1..23: note = Description of Artificial Sequence: Synthetic oligonucleotide
  source 1..23: mol_type = other RNA
  modified_base 1: mod_base = OTHER; note = 2'-O-methyladenosine-3'- phosphorothioate
  modified_base 2: mod_base = OTHER; note = 2'-fluorouridine -3'-phosphorothioate
  modified_base 3: mod_base = OTHER; note = 2'-O-methyladenosine-3'-phosphate
  modified_base 4: mod_base = OTHER; note = 2'-O-methylguanosine-3'-phosphate
  modified_base 5: mod_base = OTHER; note = 2'-O-methyluridine-3'-phosphate
  modified_base 6: mod_base = OTHER; note = 2'-fluorouridine-3'-phosphate
  modified_base 7: mod_base = OTHER; note = 2'-O-methylcytidine-3'-phosphate
  modified_base 8: mod_base = OTHER; note = 2'-fluoroadenosine-3'-phosphate
  modified_base 9: mod_base = OTHER; note = 2'-fluorocytidine-3'-phosphate
  modified_base 10: mod_base = OTHER; note = 2'-O-methyladenosine-3'-phosphate
  modified_base 11: mod_base = OTHER; note = 2'-O-methyladenosine-3'-phosphate
  modified_base 12: mod_base = OTHER; note = 2'-O-methyladenosine-3'-phosphate
  modified_base 13: mod_base = OTHER; note = 2'-O-methyladenosine-3'-phosphate
  modified_base 14: mod_base = OTHER; note = 2'-fluorouridine-3'-phosphate
  modified_base 15: mod_base = OTHER; note = 2'-O-methyladenosine-3'-phosphate
  modified_base 16: mod_base = OTHER; note = 2'-fluoroadenosine-3'-phosphate
  modified_base 17: mod_base = OTHER; note = 2'-O-methylguanosine-3'-phosphate
  modified_base 18: mod_base = OTHER; note = 2'-O-methyladenosine-3'-phosphate
  modified_base 19: mod_base = OTHER; note = 2'-O-methyluridine-3'-phosphate
  modified_base 20: mod_base = OTHER; note = 2'-O-methylcytidine-3'-phosphate
  modified_base 21: mod_base = OTHER; note = 2'-O-methylcytidine-3'- phosphorothioate
  modified_base 22: mod_base = OTHER; note = 2'-O-methyluridine-3'-phosphorothioate
  modified_base 23: mod_base = OTHER; note = 2'-O-methyluridine-3'-phosphate
atagttcacaaaataagatcctt

SEQ ID NO: 3839 - RNA, 23 nt, synthetic construct
  misc_feature 1..23: note = Description of Artificial Sequence: Synthetic oligonucleotide
  source 1..23: mol_type = other RNA
  modified_base 1: mod_base = OTHER; note = 2'-O-methyladenosine-3'- phosphorothioate
  modified_base 2: mod_base = OTHER; note = 2'-fluoroguanosine-3'-phosphorothioate
  modified_base 3: mod_base = OTHER; note = 2'-O-methyluridine-3'-phosphate
  modified_base 4: mod_base = OTHER; note = 2'-O-methyluridine-3'-phosphate
  modified_base 5: mod_base = OTHER; note = 2'-O-methylcytidine-3'-phosphate
  modified_base 6: mod_base = OTHER; note = 2'-fluoroadenosine-3'-phosphate
  modified_base 7: mod_base = OTHER; note = 2'-O-methylcytidine-3'-phosphate
  modified_base 8: mod_base = OTHER; note = 2'-fluoroadenosine-3'-phosphate
  modified_base 9: mod_base = OTHER; note = 2'-fluoroadenosine-3'-phosphate
  modified_base 10: mod_base = OTHER; note = 2'-O-methyladenosine-3'-phosphate
  modified_base 11: mod_base = OTHER; note = 2'-O-methyladenosine-3'-phosphate
  modified_base 12: mod_base = OTHER; note = 2'-O-methyluridine-3'-phosphate
  modified_base 13: mod_base = OTHER; note = 2'-O-methyladenosine-3'-phosphate
  modified_base 14: mod_base = OTHER; note = 2'-fluoroadenosine-3'-phosphate
  modified_base 15: mod_base = OTHER; note = 2'-O-methylguanosine-3'-phosphate
  modified_base 16: mod_base = OTHER; note = 2'-fluoroadenosine-3'-phosphate
  modified_base 17: mod_base = OTHER; note = 2'-O-methyluridine-3'-phosphate
  modified_base 18: mod_base = OTHER; note = 2'-O-methylcytidine-3'-phosphate
  modified_base 19: mod_base = OTHER; note = 2'-O-methylcytidine-3'-phosphate
  modified_base 20: mod_base = OTHER; note = 2'-O-methyluridine-3'-phosphate
  modified_base 21: mod_base = OTHER; note = 2'-O-methyluridine-3'-phosphorothioate
  modified_base 22: mod_base = OTHER; note = 2'-O-methyluridine-3'-phosphorothioate
  modified_base 23: mod_base = OTHER; note = 2'-O-methylguanosine-3'-phosphate
agttcacaaaataagatcctttg

SEQ ID NO: 3840 - RNA, 23 nt, synthetic construct
  misc_feature 1..23: note = Description of Artificial Sequence: Synthetic oligonucleotide
  source 1..23: mol_type = other RNA
  modified_base 1: mod_base = OTHER; note = 2'-O-methyluridine-3'-phosphorothioate
  modified_base 2: mod_base = OTHER; note = 2'-fluoroadenosine-3'-phosphorothioate
  modified_base 3: mod_base = OTHER; note = 2'-O-methyladenosine-3'-phosphate
  modified_base 4: mod_base = OTHER; note = 2'-O-methyluridine-3'-phosphate
  modified_base 5: mod_base = OTHER; note = 2'-O-methyluridine-3'-phosphate
  modified_base 6: mod_base = OTHER; note = 2'-fluoroadenosine-3'-phosphate
  modified_base 7: mod_base = OTHER; note = 2'-O-methyluridine-3'-phosphate
  modified_base 8: mod_base = OTHER; note = 2'-fluoroguanosine-3'-phosphate
  modified_base 9: mod_base = OTHER; note = 2'-fluorocytidine-3'-phosphate
  modified_base 10: mod_base = OTHER; note = 2'-O-methyladenosine-3'-phosphate
  modified_base 11: mod_base = OTHER; note = 2'-O-methylcytidine-3'-phosphate
  modified_base 12: mod_base = OTHER; note = 2'-O-methyladenosine-3'-phosphate
  modified_base 13: mod_base = OTHER; note = 2'-O-methyladenosine-3'-phosphate
  modified_base 14: mod_base = OTHER; note = 2'-fluoroguanosine-3'-phosphate
  modified_base 15: mod_base = OTHER; note = 2'-O-methyladenosine-3'-phosphate
  modified_base 16: mod_base = OTHER; note = 2'-fluorocytidine-3'-phosphate
  modified_base 17: mod_base = OTHER; note = 2'-O-methyladenosine-3'-phosphate
  modified_base 18: mod_base = OTHER; note = 2'-O-methyluridine-3'-phosphate
  modified_base 19: mod_base = OTHER; note = 2'-O-methylguanosine-3'-phosphate
  modified_base 20: mod_base = OTHER; note = 2'-O-methyladenosine-3'-phosphate
  modified_base 21: mod_base = OTHER; note = 2'-O-methyluridine-3'-phosphorothioate
  modified_base 22: mod_base = OTHER; note = 2'-O-methyladenosine-3'- phosphorothioate
  modified_base 23: mod_base = OTHER; note = 2'-O-methyluridine-3'-phosphate
taattatgcacaagacatgatat

SEQ ID NO: 3841 - RNA, 23 nt, synthetic construct
  misc_feature 1..23: note = Description of Artificial Sequence: Synthetic oligonucleotide
  source 1..23: mol_type = other RNA
  modified_base 1: mod_base = OTHER; note = 2'-O-methyladenosine-3'- phosphorothioate
  modified_base 2: mod_base = OTHER; note = 2'-fluoroguanosine-3'-phosphorothioate
  modified_base 3: mod_base = OTHER; note = 2'-O-methyladenosine-3'-phosphate
  modified_base 4: mod_base = OTHER; note = 2'-O-methylcytidine-3'-phosphate
  modified_base 5: mod_base = OTHER; note = 2'-O-methyladenosine-3'-phosphate
  modified_base 6: mod_base = OTHER; note = 2'-fluoroguanosine-3'-phosphate
  modified_base 7: mod_base = OTHER; note = 2'-O-methyluridine-3'-phosphate
  modified_base 8: mod_base = OTHER; note = 2'-fluoroguanosine-3'-phosphate
  modified_base 9: mod_base = OTHER; note = 2'-fluoroadenosine-3'-phosphate
  modified_base 10: mod_base = OTHER; note = 2'-O-methyladenosine-3'-phosphate
  modified_base 11: mod_base = OTHER; note = 2'-O-methyladenosine-3'-phosphate
  modified_base 12: mod_base = OTHER; note = 2'-O-methyluridine-3'-phosphate
  modified_base 13: mod_base = OTHER; note = 2'-O-methylguanosine-3'-phosphate
  modified_base 14: mod_base = OTHER; note = 2'-fluoroadenosine-3'-phosphate
  modified_base 15: mod_base = OTHER; note = 2'-O-methyluridine-3'-phosphate
  modified_base 16: mod_base = OTHER; note = 2'-fluoroadenosine-3'-phosphate
  modified_base 17: mod_base = OTHER; note = 2'-O-methyluridine-3'-phosphate
  modified_base 18: mod_base = OTHER; note = 2'-O-methylguanosine-3'-phosphate
  modified_base 19: mod_base = OTHER; note = 2'-O-methyladenosine-3'-phosphate
  modified_base 20: mod_base = OTHER; note = 2'-O-methylcytidine-3'-phosphate
  modified_base 21: mod_base = OTHER; note = 2'-O-methyladenosine-3'- phosphorothioate
  modified_base 22: mod_base = OTHER; note = 2'-O-methyluridine-3'-phosphorothioate
  modified_base 23: mod_base = OTHER; note = 2'-O-methylcytidine-3'-phosphate
agacagtgaaatgatatgacatc

SEQ ID NO: 3842 - RNA, 23 nt, synthetic construct
  misc_feature 1..23: note = Description of Artificial Sequence: Synthetic oligonucleotide
  source 1..23: mol_type = other RNA
  modified_base 1: mod_base = OTHER; note = 2'-O-methyluridine-3'-phosphorothioate
  modified_base 2: mod_base = OTHER; note = 2'-fluorouridine -3'-phosphorothioate
  modified_base 3: mod_base = OTHER; note = 2'-O-methyladenosine-3'-phosphate
  modified_base 4: mod_base = OTHER; note = 2'-O-methylguanosine-3'-phosphate
  modified_base 5: mod_base = OTHER; note = 2'-O-methyladenosine-3'-phosphate
  modified_base 6: mod_base = OTHER; note = 2'-fluorocytidine-3'-phosphate
  modified_base 7: mod_base = OTHER; note = 2'-O-methyladenosine-3'-phosphate
  modified_base 8: mod_base = OTHER; note = 2'-fluoroguanosine-3'-phosphate
  modified_base 9: mod_base = OTHER; note = 2'-fluorouridine-3'-phosphate
  modified_base 10: mod_base = OTHER; note = 2'-O-methylguanosine-3'-phosphate
  modified_base 11: mod_base = OTHER; note = 2'-O-methyladenosine-3'-phosphate
  modified_base 12: mod_base = OTHER; note = 2'-O-methyladenosine-3'-phosphate
  modified_base 13: mod_base = OTHER; note = 2'-O-methyladenosine-3'-phosphate
  modified_base 14: mod_base = OTHER; note = 2'-fluorouridine-3'-phosphate
  modified_base 15: mod_base = OTHER; note = 2'-O-methylguanosine-3'-phosphate
  modified_base 16: mod_base = OTHER; note = 2'-fluoroadenosine-3'-phosphate
  modified_base 17: mod_base = OTHER; note = 2'-O-methyluridine-3'-phosphate
  modified_base 18: mod_base = OTHER; note = 2'-O-methyladenosine-3'-phosphate
  modified_base 19: mod_base = OTHER; note = 2'-O-methyluridine-3'-phosphate
  modified_base 20: mod_base = OTHER; note = 2'-O-methylguanosine-3'-phosphate
  modified_base 21: mod_base = OTHER; note = 2'-O-methyladenosine-3'- phosphorothioate
  modified_base 22: mod_base = OTHER; note = 2'-O-methylcytidine-3'- phosphorothioate
  modified_base 23: mod_base = OTHER; note = 2'-O-methyladenosine-3'-phosphate
ttagacagtgaaatgatatgaca

SEQ ID NO: 3843 - RNA, 23 nt, synthetic construct
  misc_feature 1..23: note = Description of Artificial Sequence: Synthetic oligonucleotide
  source 1..23: mol_type = other RNA
  modified_base 1: mod_base = OTHER; note = 2'-O-methyluridine-3'-phosphorothioate
  modified_base 2: mod_base = OTHER; note = 2'-fluorouridine -3'-phosphorothioate
  modified_base 3: mod_base = OTHER; note = 2'-O-methylcytidine-3'-phosphate
  modified_base 4: mod_base = OTHER; note = 2'-O-methylcytidine-3'-phosphate
  modified_base 5: mod_base = OTHER; note = 2'-O-methyluridine-3'-phosphate
  modified_base 6: mod_base = OTHER; note = 2'-fluorouridine-3'-phosphate
  modified_base 7: mod_base = OTHER; note = 2'-O-methyluridine-3'-phosphate
  modified_base 8: mod_base = OTHER; note = 2'-fluoroadenosine-3'-phosphate
  modified_base 9: mod_base = OTHER; note = 2'-fluoroguanosine-3'-phosphate
  modified_base 10: mod_base = OTHER; note = 2'-O-methyladenosine-3'-phosphate
  modified_base 11: mod_base = OTHER; note = 2'-O-methyladenosine-3'-phosphate
  modified_base 12: mod_base = OTHER; note = 2'-O-methylguanosine-3'-phosphate
  modified_base 13: mod_base = OTHER; note = 2'-O-methyladenosine-3'-phosphate
  modified_base 14: mod_base = OTHER; note = 2'-fluorouridine-3'-phosphate
  modified_base 15: mod_base = OTHER; note = 2'-O-methyluridine-3'-phosphate
  modified_base 16: mod_base = OTHER; note = 2'-fluoroadenosine-3'-phosphate
  modified_base 17: mod_base = OTHER; note = 2'-O-methyluridine-3'-phosphate
  modified_base 18: mod_base = OTHER; note = 2'-O-methyladenosine-3'-phosphate
  modified_base 19: mod_base = OTHER; note = 2'-O-methyladenosine-3'-phosphate
  modified_base 20: mod_base = OTHER; note = 2'-O-methyladenosine-3'-phosphate
  modified_base 21: mod_base = OTHER; note = 2'-O-methyluridine-3'-phosphorothioate
  modified_base 22: mod_base = OTHER; note = 2'-O-methylcytidine-3'- phosphorothioate
  modified_base 23: mod_base = OTHER; note = 2'-O-methyladenosine-3'-phosphate
ttcctttagaagattataaatca

SEQ ID NO: 3844 - RNA, 23 nt, synthetic construct
  misc_feature 1..23: note = Description of Artificial Sequence: Synthetic oligonucleotide
  source 1..23: mol_type = other RNA
  modified_base 1: mod_base = OTHER; note = 2'-O-methyladenosine-3'- phosphorothioate
  modified_base 2: mod_base = OTHER; note = 2'-fluoroguanosine-3'-phosphorothioate
  modified_base 3: mod_base = OTHER; note = 2'-O-methylcytidine-3'-phosphate
  modified_base 4: mod_base = OTHER; note = 2'-O-methyluridine-3'-phosphate
  modified_base 5: mod_base = OTHER; note = 2'-O-methylguanosine-3'-phosphate
  modified_base 6: mod_base = OTHER; note = 2'-fluorouridine-3'-phosphate
  modified_base 7: mod_base = OTHER; note = 2'-O-methylguanosine-3'-phosphate
  modified_base 8: mod_base = OTHER; note = 2'-fluoroguanosine-3'-phosphate
  modified_base 9: mod_base = OTHER; note = 2'-fluoroadenosine-3'-phosphate
  modified_base 10: mod_base = OTHER; note = 2'-O-methyluridine-3'-phosphate
  modified_base 11: mod_base = OTHER; note = 2'-O-methyluridine-3'-phosphate
  modified_base 12: mod_base = OTHER; note = 2'-O-methyluridine-3'-phosphate
  modified_base 13: mod_base = OTHER; note = 2'-O-methyluridine-3'-phosphate
  modified_base 14: mod_base = OTHER; note = 2'-fluoroadenosine-3'-phosphate
  modified_base 15: mod_base = OTHER; note = 2'-O-methylcytidine-3'-phosphate
  modified_base 16: mod_base = OTHER; note = 2'-fluoroadenosine-3'-phosphate
  modified_base 17: mod_base = OTHER; note = 2'-O-methyladenosine-3'-phosphate
  modified_base 18: mod_base = OTHER; note = 2'-O-methyladenosine-3'-phosphate
  modified_base 19: mod_base = OTHER; note = 2'-O-methylcytidine-3'-phosphate
  modified_base 20: mod_base = OTHER; note = 2'-O-methylcytidine-3'-phosphate
  modified_base 21: mod_base = OTHER; note = 2'-O-methyladenosine-3'- phosphorothioate
  modified_base 22: mod_base = OTHER; note = 2'-O-methyluridine-3'-phosphorothioate
  modified_base 23: mod_base = OTHER; note = 2'-O-methyluridine-3'-phosphate
agctgtggattttacaaaccatt

SEQ ID NO: 3845 - RNA, 23 nt, synthetic construct
  misc_feature 1..23: note = Description of Artificial Sequence: Synthetic oligonucleotide
  source 1..23: mol_type = other RNA
  modified_base 1: mod_base = OTHER; note = 2'-O-methyladenosine-3'- phosphorothioate
  modified_base 2: mod_base = OTHER; note = 2'-fluoroadenosine-3'-phosphorothioate
  modified_base 3: mod_base = OTHER; note = 2'-O-methylguanosine-3'-phosphate
  modified_base 4: mod_base = OTHER; note = 2'-O-methyladenosine-3'-phosphate
  modified_base 5: mod_base = OTHER; note = 2'-O-methyluridine-3'-phosphate
  modified_base 6: mod_base = OTHER; note = 2'-fluorouridine-3'-phosphate
  modified_base 7: mod_base = OTHER; note = 2'-O-methyladenosine-3'-phosphate
  modified_base 8: mod_base = OTHER; note = 2'-fluoroadenosine-3'-phosphate
  modified_base 9: mod_base = OTHER; note = 2'-fluorouridine-3'-phosphate
  modified_base 10: mod_base = OTHER; note = 2'-O-methyladenosine-3'-phosphate
  modified_base 11: mod_base = OTHER; note = 2'-O-methylcytidine-3'-phosphate
  modified_base 12: mod_base = OTHER; note = 2'-O-methylcytidine-3'-phosphate
  modified_base 13: mod_base = OTHER; note = 2'-O-methyladenosine-3'-phosphate
  modified_base 14: mod_base = OTHER; note = 2'-fluorouridine-3'-phosphate
  modified_base 15: mod_base = OTHER; note = 2'-O-methylcytidine-3'-phosphate
  modified_base 16: mod_base = OTHER; note = 2'-fluorocytidine-3'-phosphate
  modified_base 17: mod_base = OTHER; note = 2'-O-methyladenosine-3'-phosphate
  modified_base 18: mod_base = OTHER; note = 2'-O-methylguanosine-3'-phosphate
  modified_base 19: mod_base = OTHER; note = 2'-O-methylcytidine-3'-phosphate
  modified_base 20: mod_base = OTHER; note = 2'-O-methyladenosine-3'-phosphate
  modified_base 21: mod_base = OTHER; note = 2'-O-methyluridine-3'-phosphorothioate
  modified_base 22: mod_base = OTHER; note = 2'-O-methylcytidine-3'- phosphorothioate
  modified_base 23: mod_base = OTHER; note = 2'-O-methyladenosine-3'-phosphate
aagattaataccatccagcatca

SEQ ID NO: 3846 - RNA, 23 nt, synthetic construct
  misc_feature 1..23: note = Description of Artificial Sequence: Synthetic oligonucleotide
  source 1..23: mol_type = other RNA
  modified_base 1: mod_base = OTHER; note = 2'-O-methyladenosine-3'- phosphorothioate
  modified_base 2: mod_base = OTHER; note = 2'-fluorouridine -3'-phosphorothioate
  modified_base 3: mod_base = OTHER; note = 2'-O-methylguanosine-3'-phosphate
  modified_base 4: mod_base = OTHER; note = 2'-O-methyluridine-3'-phosphate
  modified_base 5: mod_base = OTHER; note = 2'-O-methyladenosine-3'-phosphate
  modified_base 6: mod_base = OTHER; note = 2'-fluorocytidine-3'-phosphate
  modified_base 7: mod_base = OTHER; note = 2'-O-methyladenosine-3'-phosphate
  modified_base 8: mod_base = OTHER; note = 2'-fluorocytidine-3'-phosphate
  modified_base 9: mod_base = OTHER; note = 2'-fluorouridine-3'-phosphate
  modified_base 10: mod_base = OTHER; note = 2'-O-methyladenosine-3'-phosphate
  modified_base 11: mod_base = OTHER; note = 2'-O-methylcytidine-3'-phosphate
  modified_base 12: mod_base = OTHER; note = 2'-O-methyluridine-3'-phosphate
  modified_base 13: mod_base = OTHER; note = 2'-O-methylguanosine-3'-phosphate
  modified_base 14: mod_base = OTHER; note = 2'-fluoroadenosine-3'-phosphate
  modified_base 15: mod_base = OTHER; note = 2'-O-methyluridine-3'-phosphate
  modified_base 16: mod_base = OTHER; note = 2'-fluoroadenosine-3'-phosphate
  modified_base 17: mod_base = OTHER; note = 2'-O-methyluridine-3'-phosphate
  modified_base 18: mod_base = OTHER; note = 2'-O-methyladenosine-3'-phosphate
  modified_base 19: mod_base = OTHER; note = 2'-O-methylguanosine-3'-phosphate
  modified_base 20: mod_base = OTHER; note = 2'-O-methyluridine-3'-phosphate
  modified_base 21: mod_base = OTHER; note = 2'-O-methyluridine-3'-phosphorothioate
  modified_base 22: mod_base = OTHER; note = 2'-O-methylcytidine-3'- phosphorothioate
  modified_base 23: mod_base = OTHER; note = 2'-O-methyladenosine-3'-phosphate
atgtacactactgatatagttca

SEQ ID NO: 3847 - RNA, 23 nt, synthetic construct
  misc_feature 1..23: note = Description of Artificial Sequence: Synthetic oligonucleotide
  source 1..23: mol_type = other RNA
  modified_base 1: mod_base = OTHER; note = 2'-O-methyluridine-3'-phosphorothioate
  modified_base 2: mod_base = OTHER; note = 2'-fluorouridine -3'-phosphorothioate
  modified_base 3: mod_base = OTHER; note = 2'-O-methyluridine-3'-phosphate
  modified_base 4: mod_base = OTHER; note = 2'-O-methylcytidine-3'-phosphate
  modified_base 5: mod_base = OTHER; note = 2'-O-methyluridine-3'-phosphate
  modified_base 6: mod_base = OTHER; note = 2'-fluoroadenosine-3'-phosphate
  modified_base 7: mod_base = OTHER; note = 2'-O-methyladenosine-3'-phosphate
  modified_base 8: mod_base = OTHER; note = 2'-fluorocytidine-3'-phosphate
  modified_base 9: mod_base = OTHER; note = 2'-fluorouridine-3'-phosphate
  modified_base 10: mod_base = OTHER; note = 2'-O-methyluridine-3'-phosphate
  modified_base 11: mod_base = OTHER; note = 2'-O-methylcytidine-3'-phosphate
  modified_base 12: mod_base = OTHER; note = 2'-O-methyladenosine-3'-phosphate
  modified_base 13: mod_base = OTHER; note = 2'-O-methylguanosine-3'-phosphate
  modified_base 14: mod_base = OTHER; note = 2'-fluoroguanosine-3'-phosphate
  modified_base 15: mod_base = OTHER; note = 2'-O-methyladenosine-3'-phosphate
  modified_base 16: mod_base = OTHER; note = 2'-fluoroguanosine-3'-phosphate
  modified_base 17: mod_base = OTHER; note = 2'-O-methyluridine-3'-phosphate
  modified_base 18: mod_base = OTHER; note = 2'-O-methyluridine-3'-phosphate
  modified_base 19: mod_base = OTHER; note = 2'-O-methylguanosine-3'-phosphate
  modified_base 20: mod_base = OTHER; note = 2'-O-methyladenosine-3'-phosphate
  modified_base 21: mod_base = OTHER; note = 2'-O-methyluridine-3'-phosphorothioate
  modified_base 22: mod_base = OTHER; note = 2'-O-methylguanosine-3'- phosphorothioate
  modified_base 23: mod_base = OTHER; note = 2'-O-methyluridine-3'-phosphate
tttctaacttcaggagttgatgt

SEQ ID NO: 3848 - RNA, 23 nt, synthetic construct
  misc_feature 1..23: note = Description of Artificial Sequence: Synthetic oligonucleotide
  source 1..23: mol_type = other RNA
  modified_base 1: mod_base = OTHER; note = 2'-O-methyluridine-3'-phosphorothioate
  modified_base 2: mod_base = OTHER; note = 2'-fluoroadenosine-3'-phosphorothioate
  modified_base 3: mod_base = OTHER; note = 2'-O-methylcytidine-3'-phosphate
  modified_base 4: mod_base = OTHER; note = 2'-O-methyladenosine-3'-phosphate
  modified_base 5: mod_base = OTHER; note = 2'-O-methyladenosine-3'-phosphate
  modified_base 6: mod_base = OTHER; note = 2'-fluoroguanosine-3'-phosphate
  modified_base 7: mod_base = OTHER; note = 2'-O-methyladenosine-3'-phosphate
  modified_base 8: mod_base = OTHER; note = 2'-fluorouridine-3'-phosphate
  modified_base 9: mod_base = OTHER; note = 2'-fluorouridine-3'-phosphate
  modified_base 10: mod_base = OTHER; note = 2'-O-methyladenosine-3'-phosphate
  modified_base 11: mod_base = OTHER; note = 2'-O-methyladenosine-3'-phosphate
  modified_base 12: mod_base = OTHER; note = 2'-O-methyluridine-3'-phosphate
  modified_base 13: mod_base = OTHER; note = 2'-O-methyladenosine-3'-phosphate
  modified_base 14: mod_base = OTHER; note = 2'-fluorocytidine-3'-phosphate
  modified_base 15: mod_base = OTHER; note = 2'-O-methylcytidine-3'-phosphate
  modified_base 16: mod_base = OTHER; note = 2'-fluoroadenosine-3'-phosphate
  modified_base 17: mod_base = OTHER; note = 2'-O-methyluridine-3'-phosphate
  modified_base 18: mod_base = OTHER; note = 2'-O-methylcytidine-3'-phosphate
  modified_base 19: mod_base = OTHER; note = 2'-O-methylcytidine-3'-phosphate
  modified_base 20: mod_base = OTHER; note = 2'-O-methyladenosine-3'-phosphate
  modified_base 21: mod_base = OTHER; note = 2'-O-methylguanosine-3'- phosphorothioate
  modified_base 22: mod_base = OTHER; note = 2'-O-methylcytidine-3'- phosphorothioate
  modified_base 23: mod_base = OTHER; note = 2'-O-methyladenosine-3'-phosphate
tacaagattaataccatccagca

SEQ ID NO: 3849 - RNA, 23 nt, synthetic construct
  misc_feature 1..23: note = Description of Artificial Sequence: Synthetic oligonucleotide
  source 1..23: mol_type = other RNA
  modified_base 1: mod_base = OTHER; note = 2'-O-methyladenosine-3'- phosphorothioate
  modified_base 2: mod_base = OTHER; note = 2'-fluoroguanosine-3'-phosphorothioate
  modified_base 3: mod_base = OTHER; note = 2'-O-methylcytidine-3'-phosphate
  modified_base 4: mod_base = OTHER; note = 2'-O-methylcytidine-3'-phosphate
  modified_base 5: mod_base = OTHER; note = 2'-O-methyluridine-3'-phosphate
  modified_base 6: mod_base = OTHER; note = 2'-fluoroadenosine-3'-phosphate
  modified_base 7: mod_base = OTHER; note = 2'-O-methylguanosine-3'-phosphate
  modified_base 8: mod_base = OTHER; note = 2'-fluoroadenosine-3'-phosphate
  modified_base 9: mod_base = OTHER; note = 2'-fluorocytidine-3'-phosphate
  modified_base 10: mod_base = OTHER; note = 2'-O-methyladenosine-3'-phosphate
  modified_base 11: mod_base = OTHER; note = 2'-O-methylguanosine-3'-phosphate
  modified_base 12: mod_base = OTHER; note = 2'-O-methyluridine-3'-phosphate
  modified_base 13: mod_base = OTHER; note = 2'-O-methylguanosine-3'-phosphate
  modified_base 14: mod_base = OTHER; note = 2'-fluoroadenosine-3'-phosphate
  modified_base 15: mod_base = OTHER; note = 2'-O-methyladenosine-3'-phosphate
  modified_base 16: mod_base = OTHER; note = 2'-fluoroadenosine-3'-phosphate
  modified_base 17: mod_base = OTHER; note = 2'-O-methyluridine-3'-phosphate
  modified_base 18: mod_base = OTHER; note = 2'-O-methylguanosine-3'-phosphate
  modified_base 19: mod_base = OTHER; note = 2'-O-methyladenosine-3'-phosphate
  modified_base 20: mod_base = OTHER; note = 2'-O-methyluridine-3'-phosphate
  modified_base 21: mod_base = OTHER; note = 2'-O-methyladenosine-3'- phosphorothioate
  modified_base 22: mod_base = OTHER; note = 2'-O-methyluridine-3'-phosphorothioate
  modified_base 23: mod_base = OTHER; note = 2'-O-methylguanosine-3'-phosphate
agcctagacagtgaaatgatatg

SEQ ID NO: 3850 - RNA, 23 nt, synthetic construct
  misc_feature 1..23: note = Description of Artificial Sequence: Synthetic oligonucleotide
  source 1..23: mol_type = other RNA
  modified_base 1: mod_base = OTHER; note = 2'-O-methyluridine-3'-phosphorothioate
  modified_base 2: mod_base = OTHER; note = 2'-fluoroguanosine-3'-phosphorothioate
  modified_base 3: mod_base = OTHER; note = 2'-O-methyladenosine-3'-phosphate
  modified_base 4: mod_base = OTHER; note = 2'-O-methyluridine-3'-phosphate
  modified_base 5: mod_base = OTHER; note = 2'-O-methyladenosine-3'-phosphate
  modified_base 6: mod_base = OTHER; note = 2'-fluorouridine-3'-phosphate
  modified_base 7: mod_base = OTHER; note = 2'-O-methyladenosine-3'-phosphate
  modified_base 8: mod_base = OTHER; note = 2'-fluoroguanosine-3'-phosphate
  modified_base 9: mod_base = OTHER; note = 2'-fluorocytidine-3'-phosphate
  modified_base 10: mod_base = OTHER; note = 2'-O-methyluridine-3'-phosphate
  modified_base 11: mod_base = OTHER; note = 2'-O-methylguanosine-3'-phosphate
  modified_base 12: mod_base = OTHER; note = 2'-O-methyluridine-3'-phosphate
  modified_base 13: mod_base = OTHER; note = 2'-O-methylguanosine-3'-phosphate
  modified_base 14: mod_base = OTHER; note = 2'-fluoroguanosine-3'-phosphate
  modified_base 15: mod_base = OTHER; note = 2'-O-methyladenosine-3'-phosphate
  modified_base 16: mod_base = OTHER; note = 2'-fluorouridine-3'-phosphate
  modified_base 17: mod_base = OTHER; note = 2'-O-methyluridine-3'-phosphate
  modified_base 18: mod_base = OTHER; note = 2'-O-methyluridine-3'-phosphate
  modified_base 19: mod_base = OTHER; note = 2'-O-methyluridine-3'-phosphate
  modified_base 20: mod_base = OTHER; note = 2'-O-methyladenosine-3'-phosphate
  modified_base 21: mod_base = OTHER; note = 2'-O-methylcytidine-3'- phosphorothioate
  modified_base 22: mod_base = OTHER; note = 2'-O-methyladenosine-3'- phosphorothioate
  modified_base 23: mod_base = OTHER; note = 2'-O-methyladenosine-3'-phosphate
tgatatagctgtggattttacaa

SEQ ID NO: 3851 - RNA, 23 nt, synthetic construct
  misc_feature 1..23: note = Description of Artificial Sequence: Synthetic oligonucleotide
  source 1..23: mol_type = other RNA
  modified_base 1: mod_base = OTHER; note = 2'-O-methyladenosine-3'- phosphorothioate
  modified_base 2: mod_base = OTHER; note = 2'-fluoroadenosine-3'-phosphorothioate
  modified_base 3: mod_base = OTHER; note = 2'-O-methyladenosine-3'-phosphate
  modified_base 4: mod_base = OTHER; note = 2'-O-methyluridine-3'-phosphate
  modified_base 5: mod_base = OTHER; note = 2'-O-methylguanosine-3'-phosphate
  modified_base 6: mod_base = OTHER; note = 2'-fluorocytidine-3'-phosphate
  modified_base 7: mod_base = OTHER; note = 2'-O-methyladenosine-3'-phosphate
  modified_base 8: mod_base = OTHER; note = 2'-fluoroadenosine-3'-phosphate
  modified_base 9: mod_base = OTHER; note = 2'-fluoroguanosine-3'-phosphate
  modified_base 10: mod_base = OTHER; note = 2'-O-methylguanosine-3'-phosphate
  modified_base 11: mod_base = OTHER; note = 2'-O-methyladenosine-3'-phosphate
  modified_base 12: mod_base = OTHER; note = 2'-O-methyladenosine-3'-phosphate
  modified_base 13: mod_base = OTHER; note = 2'-O-methylcytidine-3'-phosphate
  modified_base 14: mod_base = OTHER; note = 2'-fluoroadenosine-3'-phosphate
  modified_base 15: mod_base = OTHER; note = 2'-O-methylcytidine-3'-phosphate
  modified_base 16: mod_base = OTHER; note = 2'-fluorouridine-3'-phosphate
  modified_base 17: mod_base = OTHER; note = 2'-O-methyladenosine-3'-phosphate
  modified_base 18: mod_base = OTHER; note = 2'-O-methyladenosine-3'-phosphate
  modified_base 19: mod_base = OTHER; note = 2'-O-methylguanosine-3'-phosphate
  modified_base 20: mod_base = OTHER; note = 2'-O-methylguanosine-3'-phosphate
  modified_base 21: mod_base = OTHER; note = 2'-O-methyladenosine-3'- phosphorothioate
  modified_base 22: mod_base = OTHER; note = 2'-O-methyladenosine-3'- phosphorothioate
  modified_base 23: mod_base = OTHER; note = 2'-O-methylguanosine-3'-phosphate
aaatgcaaggaacactaaggaag

SEQ ID NO: 3852 - RNA, 23 nt, synthetic construct
  misc_feature 1..23: note = Description of Artificial Sequence: Synthetic oligonucleotide
  source 1..23: mol_type = other RNA
  modified_base 1: mod_base = OTHER; note = 2'-O-methyluridine-3'-phosphorothioate
  modified_base 2: mod_base = OTHER; note = 2'-fluorocytidine-3'-phosphorothioate
  modified_base 3: mod_base = OTHER; note = 2'-O-methyluridine-3'-phosphate
  modified_base 4: mod_base = OTHER; note = 2'-O-methyladenosine-3'-phosphate
  modified_base 5: mod_base = OTHER; note = 2'-O-methylguanosine-3'-phosphate
  modified_base 6: mod_base = OTHER; note = 2'-fluoroadenosine-3'-phosphate
  modified_base 7: mod_base = OTHER; note = 2'-O-methylcytidine-3'-phosphate
  modified_base 8: mod_base = OTHER; note = 2'-fluoroadenosine-3'-phosphate
  modified_base 9: mod_base = OTHER; note = 2'-fluoroguanosine-3'-phosphate
  modified_base 10: mod_base = OTHER; note = 2'-O-methyluridine-3'-phosphate
  modified_base 11: mod_base = OTHER; note = 2'-O-methylguanosine-3'-phosphate
  modified_base 12: mod_base = OTHER; note = 2'-O-methyladenosine-3'-phosphate
  modified_base 13: mod_base = OTHER; note = 2'-O-methyladenosine-3'-phosphate
  modified_base 14: mod_base = OTHER; note = 2'-fluoroadenosine-3'-phosphate
  modified_base 15: mod_base = OTHER; note = 2'-O-methyluridine-3'-phosphate
  modified_base 16: mod_base = OTHER; note = 2'-fluoroguanosine-3'-phosphate
  modified_base 17: mod_base = OTHER; note = 2'-O-methyladenosine-3'-phosphate
  modified_base 18: mod_base = OTHER; note = 2'-O-methyluridine-3'-phosphate
  modified_base 19: mod_base = OTHER; note = 2'-O-methyladenosine-3'-phosphate
  modified_base 20: mod_base = OTHER; note = 2'-O-methyluridine-3'-phosphate
  modified_base 21: mod_base = OTHER; note = 2'-O-methylguanosine-3'- phosphorothioate
  modified_base 22: mod_base = OTHER; note = 2'-O-methyladenosine-3'- phosphorothioate
  modified_base 23: mod_base = OTHER; note = 2'-O-methylcytidine-3'-phosphate
tctagacagtgaaatgatatgac

SEQ ID NO: 3853 - RNA, 23 nt, synthetic construct
  misc_feature 1..23: note = Description of Artificial Sequence: Synthetic oligonucleotide
  source 1..23: mol_type = other RNA
  modified_base 1: mod_base = OTHER; note = 2'-O-methyluridine-3'-phosphorothioate
  modified_base 2: mod_base = OTHER; note = 2'-fluorouridine -3'-phosphorothioate
  modified_base 3: mod_base = OTHER; note = 2'-O-methyladenosine-3'-phosphate
  modified_base 4: mod_base = OTHER; note = 2'-O-methyladenosine-3'-phosphate
  modified_base 5: mod_base = OTHER; note = 2'-O-methylcytidine-3'-phosphate
  modified_base 6: mod_base = OTHER; note = 2'-fluorouridine-3'-phosphate
  modified_base 7: mod_base = OTHER; note = 2'-O-methyluridine-3'-phosphate
  modified_base 8: mod_base = OTHER; note = 2'-fluorocytidine-3'-phosphate
  modified_base 9: mod_base = OTHER; note = 2'-fluoroadenosine-3'-phosphate
  modified_base 10: mod_base = OTHER; note = 2'-O-methylguanosine-3'-phosphate
  modified_base 11: mod_base = OTHER; note = 2'-O-methylguanosine-3'-phosphate
  modified_base 12: mod_base = OTHER; note = 2'-O-methyladenosine-3'-phosphate
  modified_base 13: mod_base = OTHER; note = 2'-O-methylguanosine-3'-phosphate
  modified_base 14: mod_base = OTHER; note = 2'-fluorouridine-3'-phosphate
  modified_base 15: mod_base = OTHER; note = 2'-O-methyluridine-3'-phosphate
  modified_base 16: mod_base = OTHER; note = 2'-fluoroguanosine-3'-phosphate
  modified_base 17: mod_base = OTHER; note = 2'-O-methyladenosine-3'-phosphate
  modified_base 18: mod_base = OTHER; note = 2'-O-methyluridine-3'-phosphate
  modified_base 19: mod_base = OTHER; note = 2'-O-methylguanosine-3'-phosphate
  modified_base 20: mod_base = OTHER; note = 2'-O-methyluridine-3'-phosphate
  modified_base 21: mod_base = OTHER; note = 2'-O-methyluridine-3'-phosphorothioate
  modified_base 22: mod_base = OTHER; note = 2'-O-methyluridine-3'-phosphorothioate
  modified_base 23: mod_base = OTHER; note = 2'-O-methyluridine-3'-phosphate
ttaacttcaggagttgatgtttt

SEQ ID NO: 3854 - RNA, 23 nt, synthetic construct
  misc_feature 1..23: note = Description of Artificial Sequence: Synthetic oligonucleotide
  source 1..23: mol_type = other RNA
  modified_base 1: mod_base = OTHER; note = 2'-O-methyluridine-3'-phosphorothioate
  modified_base 2: mod_base = OTHER; note = 2'-fluorouridine -3'-phosphorothioate
  modified_base 3: mod_base = OTHER; note = 2'-O-methyladenosine-3'-phosphate
  modified_base 4: mod_base = OTHER; note = 2'-O-methyladenosine-3'-phosphate
  modified_base 5: mod_base = OTHER; note = 2'-O-methyluridine-3'-phosphate
  modified_base 6: mod_base = OTHER; note = 2'-fluoroadenosine-3'-phosphate
  modified_base 7: mod_base = OTHER; note = 2'-O-methylcytidine-3'-phosphate
  modified_base 8: mod_base = OTHER; note = 2'-fluorocytidine-3'-phosphate
  modified_base 9: mod_base = OTHER; note = 2'-fluoroadenosine-3'-phosphate
  modified_base 10: mod_base = OTHER; note = 2'-O-methyluridine-3'-phosphate
  modified_base 11: mod_base = OTHER; note = 2'-O-methylcytidine-3'-phosphate
  modified_base 12: mod_base = OTHER; note = 2'-O-methylcytidine-3'-phosphate
  modified_base 13: mod_base = OTHER; note = 2'-O-methyladenosine-3'-phosphate
  modified_base 14: mod_base = OTHER; note = 2'-fluoroguanosine-3'-phosphate
  modified_base 15: mod_base = OTHER; note = 2'-O-methylcytidine-3'-phosphate
  modified_base 16: mod_base = OTHER; note = 2'-fluoroadenosine-3'-phosphate
  modified_base 17: mod_base = OTHER; note = 2'-O-methyluridine-3'-phosphate
  modified_base 18: mod_base = OTHER; note = 2'-O-methylcytidine-3'-phosphate
  modified_base 19: mod_base = OTHER; note = 2'-O-methyladenosine-3'-phosphate
  modified_base 20: mod_base = OTHER; note = 2'-O-methylguanosine-3'-phosphate
  modified_base 21: mod_base = OTHER; note = 2'-O-methylguanosine-3'- phosphorothioate
  modified_base 22: mod_base = OTHER; note = 2'-O-methyladenosine-3'- phosphorothioate
  modified_base 23: mod_base = OTHER; note = 2'-O-methyluridine-3'-phosphate
ttaataccatccagcatcaggat

SEQ ID NO: 3855 - RNA, 23 nt, synthetic construct
  misc_feature 1..23: note = Description of Artificial Sequence: Synthetic oligonucleotide
  source 1..23: mol_type = other RNA
  modified_base 1: mod_base = OTHER; note = 2'-O-methyladenosine-3'- phosphorothioate
  modified_base 2: mod_base = OTHER; note = 2'-fluorocytidine-3'-phosphorothioate
  modified_base 3: mod_base = OTHER; note = 2'-O-methyluridine-3'-phosphate
  modified_base 4: mod_base = OTHER; note = 2'-O-methyluridine-3'-phosphate
  modified_base 5: mod_base = OTHER; note = 2'-O-methylguanosine-3'-phosphate
  modified_base 6: mod_base = OTHER; note = 2'-fluoroguanosine-3'-phosphate
  modified_base 7: mod_base = OTHER; note = 2'-O-methyladenosine-3'-phosphate
  modified_base 8: mod_base = OTHER; note = 2'-fluorouridine-3'-phosphate
  modified_base 9: mod_base = OTHER; note = 2'-fluoroadenosine-3'-phosphate
  modified_base 10: mod_base = OTHER; note = 2'-O-methylguanosine-3'-phosphate
  modified_base 11: mod_base = OTHER; note = 2'-O-methyluridine-3'-phosphate
  modified_base 12: mod_base = OTHER; note = 2'-O-methyluridine-3'-phosphate
  modified_base 13: mod_base = OTHER; note = 2'-O-methylguanosine-3'-phosphate
  modified_base 14: mod_base = OTHER; note = 2'-fluoroguanosine-3'-phosphate
  modified_base 15: mod_base = OTHER; note = 2'-O-methyluridine-3'-phosphate
  modified_base 16: mod_base = OTHER; note = 2'-fluorouridine-3'-phosphate
  modified_base 17: mod_base = OTHER; note = 2'-O-methylguanosine-3'-phosphate
  modified_base 18: mod_base = OTHER; note = 2'-O-methylcytidine-3'-phosphate
  modified_base 19: mod_base = OTHER; note = 2'-O-methyladenosine-3'-phosphate
  modified_base 20: mod_base = OTHER; note = 2'-O-methyluridine-3'-phosphate
  modified_base 21: mod_base = OTHER; note = 2'-O-methyluridine-3'-phosphorothioate
  modified_base 22: mod_base = OTHER; note = 2'-O-methylguanosine-3'- phosphorothioate
  modified_base 23: mod_base = OTHER; note = 2'-O-methyluridine-3'-phosphate
acttggatagttggttgcattgt

SEQ ID NO: 3856 - RNA, 23 nt, synthetic construct
  misc_feature 1..23: note = Description of Artificial Sequence: Synthetic oligonucleotide
  source 1..23: mol_type = other RNA
  modified_base 1: mod_base = OTHER; note = 2'-O-methyluridine-3'-phosphorothioate
  modified_base 2: mod_base = OTHER; note = 2'-fluoroadenosine-3'-phosphorothioate
  modified_base 3: mod_base = OTHER; note = 2'-O-methyluridine-3'-phosphate
  modified_base 4: mod_base = OTHER; note = 2'-O-methylcytidine-3'-phosphate
  modified_base 5: mod_base = OTHER; note = 2'-O-methyladenosine-3'-phosphate
  modified_base 6: mod_base = OTHER; note = 2'-fluorouridine-3'-phosphate
  modified_base 7: mod_base = OTHER; note = 2'-O-methylcytidine-3'-phosphate
  modified_base 8: mod_base = OTHER; note = 2'-fluorocytidine-3'-phosphate
  modified_base 9: mod_base = OTHER; note = 2'-fluorouridine-3'-phosphate
  modified_base 10: mod_base = OTHER; note = 2'-O-methyluridine-3'-phosphate
  modified_base 11: mod_base = OTHER; note = 2'-O-methyluridine-3'-phosphate
  modified_base 12: mod_base = OTHER; note = 2'-O-methyladenosine-3'-phosphate
  modified_base 13: mod_base = OTHER; note = 2'-O-methyluridine-3'-phosphate
  modified_base 14: mod_base = OTHER; note = 2'-fluorouridine-3'-phosphate
  modified_base 15: mod_base = OTHER; note = 2'-O-methylcytidine-3'-phosphate
  modified_base 16: mod_base = OTHER; note = 2'-fluorocytidine-3'-phosphate
  modified_base 17: mod_base = OTHER; note = 2'-O-methylguanosine-3'-phosphate
  modified_base 18: mod_base = OTHER; note = 2'-O-methyluridine-3'-phosphate
  modified_base 19: mod_base = OTHER; note = 2'-O-methyladenosine-3'-phosphate
  modified_base 20: mod_base = OTHER; note = 2'-O-methyladenosine-3'-phosphate
  modified_base 21: mod_base = OTHER; note = 2'-O-methyladenosine-3'- phosphorothioate
  modified_base 22: mod_base = OTHER; note = 2'-O-methylguanosine-3'- phosphorothioate
  modified_base 23: mod_base = OTHER; note = 2'-O-methyladenosine-3'-phosphate
tatcatcctttattccgtaaaga

SEQ ID NO: 3857 - RNA, 23 nt, synthetic construct
  misc_feature 1..23: note = Description of Artificial Sequence: Synthetic oligonucleotide
  source 1..23: mol_type = other RNA
  modified_base 1: mod_base = OTHER; note = 2'-O-methyladenosine-3'- phosphorothioate
  modified_base 2: mod_base = OTHER; note = 2'-fluoroadenosine-3'-phosphorothioate
  modified_base 3: mod_base = OTHER; note = 2'-O-methyluridine-3'-phosphate
  modified_base 4: mod_base = OTHER; note = 2'-O-methylguanosine-3'-phosphate
  modified_base 5: mod_base = OTHER; note = 2'-O-methylcytidine-3'-phosphate
  modified_base 6: mod_base = OTHER; note = 2'-fluoroadenosine-3'-phosphate
  modified_base 7: mod_base = OTHER; note = 2'-O-methyladenosine-3'-phosphate
  modified_base 8: mod_base = OTHER; note = 2'-fluoroguanosine-3'-phosphate
  modified_base 9: mod_base = OTHER; note = 2'-fluoroguanosine-3'-phosphate
  modified_base 10: mod_base = OTHER; note = 2'-O-methyladenosine-3'-phosphate
  modified_base 11: mod_base = OTHER; note = 2'-O-methyladenosine-3'-phosphate
  modified_base 12: mod_base = OTHER; note = 2'-O-methylcytidine-3'-phosphate
  modified_base 13: mod_base = OTHER; note = 2'-O-methyladenosine-3'-phosphate
  modified_base 14: mod_base = OTHER; note = 2'-fluorocytidine-3'-phosphate
  modified_base 15: mod_base = OTHER; note = 2'-O-methyluridine-3'-phosphate
  modified_base 16: mod_base = OTHER; note = 2'-fluoroadenosine-3'-phosphate
  modified_base 17: mod_base = OTHER; note = 2'-O-methyladenosine-3'-phosphate
  modified_base 18: mod_base = OTHER; note = 2'-O-methylguanosine-3'-phosphate
  modified_base 19: mod_base = OTHER; note = 2'-O-methylguanosine-3'-phosphate
  modified_base 20: mod_base = OTHER; note = 2'-O-methyladenosine-3'-phosphate
  modified_base 21: mod_base = OTHER; note = 2'-O-methyladenosine-3'- phosphorothioate
  modified_base 22: mod_base = OTHER; note = 2'-O-methylguanosine-3'- phosphorothioate
  modified_base 23: mod_base = OTHER; note = 2'-O-methyladenosine-3'-phosphate
aatgcaaggaacactaaggaaga

SEQ ID NO: 3858 - RNA, 23 nt, synthetic construct
  misc_feature 1..23: note = Description of Artificial Sequence: Synthetic oligonucleotide
  source 1..23: mol_type = other RNA
  modified_base 1: mod_base = OTHER; note = 2'-O-methyluridine-3'-phosphorothioate
  modified_base 2: mod_base = OTHER; note = 2'-fluorouridine -3'-phosphorothioate
  modified_base 3: mod_base = OTHER; note = 2'-O-methyluridine-3'-phosphate
  modified_base 4: mod_base = OTHER; note = 2'-O-methylguanosine-3'-phosphate
  modified_base 5: mod_base = OTHER; note = 2'-O-methylguanosine-3'-phosphate
  modified_base 6: mod_base = OTHER; note = 2'-fluoroadenosine-3'-phosphate
  modified_base 7: mod_base = OTHER; note = 2'-O-methyluridine-3'-phosphate
  modified_base 8: mod_base = OTHER; note = 2'-fluoroadenosine-3'-phosphate
  modified_base 9: mod_base = OTHER; note = 2'-fluoroguanosine-3'-phosphate
  modified_base 10: mod_base = OTHER; note = 2'-O-methyluridine-3'-phosphate
  modified_base 11: mod_base = OTHER; note = 2'-O-methyluridine-3'-phosphate
  modified_base 12: mod_base = OTHER; note = 2'-O-methylguanosine-3'-phosphate
  modified_base 13: mod_base = OTHER; note = 2'-O-methylguanosine-3'-phosphate
  modified_base 14: mod_base = OTHER; note = 2'-fluorouridine-3'-phosphate
  modified_base 15: mod_base = OTHER; note = 2'-O-methyluridine-3'-phosphate
  modified_base 16: mod_base = OTHER; note = 2'-fluoroguanosine-3'-phosphate
  modified_base 17: mod_base = OTHER; note = 2'-O-methylcytidine-3'-phosphate
  modified_base 18: mod_base = OTHER; note = 2'-O-methyladenosine-3'-phosphate
  modified_base 19: mod_base = OTHER; note = 2'-O-methyluridine-3'-phosphate
  modified_base 20: mod_base = OTHER; note = 2'-O-methyluridine-3'-phosphate
  modified_base 21: mod_base = OTHER; note = 2'-O-methylguanosine-3'- phosphorothioate
  modified_base 22: mod_base = OTHER; note = 2'-O-methyluridine-3'-phosphorothioate
  modified_base 23: mod_base = OTHER; note = 2'-O-methyluridine-3'-phosphate
tttggatagttggttgcattgtt

SEQ ID NO: 3859 - RNA, 23 nt, synthetic construct
  misc_feature 1..23: note = Description of Artificial Sequence: Synthetic oligonucleotide
  source 1..23: mol_type = other RNA
  modified_base 1: mod_base = OTHER; note = 2'-O-methyladenosine-3'- phosphorothioate
  modified_base 2: mod_base = OTHER; note = 2'-fluorouridine -3'-phosphorothioate
  modified_base 3: mod_base = OTHER; note = 2'-O-methyluridine-3'-phosphate
  modified_base 4: mod_base = OTHER; note = 2'-O-methyladenosine-3'-phosphate
  modified_base 5: mod_base = OTHER; note = 2'-O-methyluridine-3'-phosphate
  modified_base 6: mod_base = OTHER; note = 2'-fluoroadenosine-3'-phosphate
  modified_base 7: mod_base = OTHER; note = 2'-O-methylcytidine-3'-phosphate
  modified_base 8: mod_base = OTHER; note = 2'-fluorouridine-3'-phosphate
  modified_base 9: mod_base = OTHER; note = 2'-fluorocytidine-3'-phosphate
  modified_base 10: mod_base = OTHER; note = 2'-O-methyluridine-3'-phosphate
  modified_base 11: mod_base = OTHER; note = 2'-O-methylcytidine-3'-phosphate
  modified_base 12: mod_base = OTHER; note = 2'-O-methyluridine-3'-phosphate
  modified_base 13: mod_base = OTHER; note = 2'-O-methylguanosine-3'-phosphate
  modified_base 14: mod_base = OTHER; note = 2'-fluorocytidine-3'-phosphate
  modified_base 15: mod_base = OTHER; note = 2'-O-methylcytidine-3'-phosphate
  modified_base 16: mod_base = OTHER; note = 2'-fluoroadenosine-3'-phosphate
  modified_base 17: mod_base = OTHER; note = 2'-O-methyladenosine-3'-phosphate
  modified_base 18: mod_base = OTHER; note = 2'-O-methyladenosine-3'-phosphate
  modified_base 19: mod_base = OTHER; note = 2'-O-methyluridine-3'-phosphate
  modified_base 20: mod_base = OTHER; note = 2'-O-methylcytidine-3'-phosphate
  modified_base 21: mod_base = OTHER; note = 2'-O-methyluridine-3'-phosphorothioate
  modified_base 22: mod_base = OTHER; note = 2'-O-methylguanosine-3'- phosphorothioate
  modified_base 23: mod_base = OTHER; note = 2'-O-methylcytidine-3'-phosphate
attatactctctgccaaatctgc

SEQ ID NO: 3860 - RNA, 23 nt, synthetic construct
  misc_feature 1..23: note = Description of Artificial Sequence: Synthetic oligonucleotide
  source 1..23: mol_type = other RNA
  modified_base 1: mod_base = OTHER; note = 2'-O-methyluridine-3'-phosphorothioate
  modified_base 2: mod_base = OTHER; note = 2'-fluoroadenosine-3'-phosphorothioate
  modified_base 3: mod_base = OTHER; note = 2'-O-methylcytidine-3'-phosphate
  modified_base 4: mod_base = OTHER; note = 2'-O-methylcytidine-3'-phosphate
  modified_base 5: mod_base = OTHER; note = 2'-O-methylcytidine-3'-phosphate
  modified_base 6: mod_base = OTHER; note = 2'-fluorouridine-3'-phosphate
  modified_base 7: mod_base = OTHER; note = 2'-O-methyluridine-3'-phosphate
  modified_base 8: mod_base = OTHER; note = 2'-fluoroadenosine-3'-phosphate
  modified_base 9: mod_base = OTHER; note = 2'-fluoroadenosine-3'-phosphate
  modified_base 10: mod_base = OTHER; note = 2'-O-methyluridine-3'-phosphate
  modified_base 11: mod_base = OTHER; note = 2'-O-methylcytidine-3'-phosphate
  modified_base 12: mod_base = OTHER; note = 2'-O-methyladenosine-3'-phosphate
  modified_base 13: mod_base = OTHER; note = 2'-O-methyluridine-3'-phosphate
  modified_base 14: mod_base = OTHER; note = 2'-fluoroguanosine-3'-phosphate
  modified_base 15: mod_base = OTHER; note = 2'-O-methylguanosine-3'-phosphate
  modified_base 16: mod_base = OTHER; note = 2'-fluorouridine-3'-phosphate
  modified_base 17: mod_base = OTHER; note = 2'-O-methylguanosine-3'-phosphate
  modified_base 18: mod_base = OTHER; note = 2'-O-methylguanosine-3'-phosphate
  modified_base 19: mod_base = OTHER; note = 2'-O-methyladenosine-3'-phosphate
  modified_base 20: mod_base = OTHER; note = 2'-O-methyladenosine-3'-phosphate
  modified_base 21: mod_base = OTHER; note = 2'-O-methyladenosine-3'- phosphorothioate
  modified_base 22: mod_base = OTHER; note = 2'-O-methylcytidine-3'- phosphorothioate
  modified_base 23: mod_base = OTHER; note = 2'-O-methyluridine-3'-phosphate
tacccttaatcatggtggaaact

SEQ ID NO: 3861 - RNA, 23 nt, synthetic construct
  misc_feature 1..23: note = Description of Artificial Sequence: Synthetic oligonucleotide
  source 1..23: mol_type = other RNA
  modified_base 1: mod_base = OTHER; note = 2'-O-methyladenosine-3'- phosphorothioate
  modified_base 2: mod_base = OTHER; note = 2'-fluoroadenosine-3'-phosphorothioate
  modified_base 3: mod_base = OTHER; note = 2'-O-methylcytidine-3'-phosphate
  modified_base 4: mod_base = OTHER; note = 2'-O-methyluridine-3'-phosphate
  modified_base 5: mod_base = OTHER; note = 2'-O-methyladenosine-3'-phosphate
  modified_base 6: mod_base = OTHER; note = 2'-fluorouridine-3'-phosphate
  modified_base 7: mod_base = OTHER; note = 2'-O-methyluridine-3'-phosphate
  modified_base 8: mod_base = OTHER; note = 2'-fluorouridine-3'-phosphate
  modified_base 9: mod_base = OTHER; note = 2'-fluorocytidine-3'-phosphate
  modified_base 10: mod_base = OTHER; note = 2'-O-methyladenosine-3'-phosphate
  modified_base 11: mod_base = OTHER; note = 2'-O-methylcytidine-3'-phosphate
  modified_base 12: mod_base = OTHER; note = 2'-O-methyladenosine-3'-phosphate
  modified_base 13: mod_base = OTHER; note = 2'-O-methylcytidine-3'-phosphate
  modified_base 14: mod_base = OTHER; note = 2'-fluorouridine-3'-phosphate
  modified_base 15: mod_base = OTHER; note = 2'-O-methyladenosine-3'-phosphate
  modified_base 16: mod_base = OTHER; note = 2'-fluoroadenosine-3'-phosphate
  modified_base 17: mod_base = OTHER; note = 2'-O-methylcytidine-3'-phosphate
  modified_base 18: mod_base = OTHER; note = 2'-O-methylcytidine-3'-phosphate
  modified_base 19: mod_base = OTHER; note = 2'-O-methyladenosine-3'-phosphate
  modified_base 20: mod_base = OTHER; note = 2'-O-methylguanosine-3'-phosphate
  modified_base 21: mod_base = OTHER; note = 2'-O-methyluridine-3'-phosphorothioate
  modified_base 22: mod_base = OTHER; note = 2'-O-methyluridine-3'-phosphorothioate
  modified_base 23: mod_base = OTHER; note = 2'-O-methylguanosine-3'-phosphate
aactatttcacactaaccagttg

SEQ ID NO: 3862 - RNA, 23 nt, synthetic construct
  misc_feature 1..23: note = Description of Artificial Sequence: Synthetic oligonucleotide
  source 1..23: mol_type = other RNA
  modified_base 1: mod_base = OTHER; note = 2'-O-methyladenosine-3'- phosphorothioate
  modified_base 2: mod_base = OTHER; note = 2'-fluoroguanosine-3'-phosphorothioate
  modified_base 3: mod_base = OTHER; note = 2'-O-methyladenosine-3'-phosphate
  modified_base 4: mod_base = OTHER; note = 2'-O-methylguanosine-3'-phosphate
  modified_base 5: mod_base = OTHER; note = 2'-O-methyluridine-3'-phosphate
  modified_base 6: mod_base = OTHER; note = 2'-fluorouridine-3'-phosphate
  modified_base 7: mod_base = OTHER; note = 2'-O-methylguanosine-3'-phosphate
  modified_base 8: mod_base = OTHER; note = 2'-fluorocytidine-3'-phosphate
  modified_base 9: mod_base = OTHER; note = 2'-fluorocytidine-3'-phosphate
  modified_base 10: mod_base = OTHER; note = 2'-O-methyladenosine-3'-phosphate
  modified_base 11: mod_base = OTHER; note = 2'-O-methyluridine-3'-phosphate
  modified_base 12: mod_base = OTHER; note = 2'-O-methyladenosine-3'-phosphate
  modified_base 13: mod_base = OTHER; note = 2'-O-methyluridine-3'-phosphate
  modified_base 14: mod_base = OTHER; note = 2'-fluorouridine-3'-phosphate
  modified_base 15: mod_base = OTHER; note = 2'-O-methylguanosine-3'-phosphate
  modified_base 16: mod_base = OTHER; note = 2'-fluoroguanosine-3'-phosphate
  modified_base 17: mod_base = OTHER; note = 2'-O-methyladenosine-3'-phosphate
  modified_base 18: mod_base = OTHER; note = 2'-O-methylcytidine-3'-phosphate
  modified_base 19: mod_base = OTHER; note = 2'-O-methyluridine-3'-phosphate
  modified_base 20: mod_base = OTHER; note = 2'-O-methyluridine-3'-phosphate
  modified_base 21: mod_base = OTHER; note = 2'-O-methylguanosine-3'- phosphorothioate
  modified_base 22: mod_base = OTHER; note = 2'-O-methylguanosine-3'- phosphorothioate
  modified_base 23: mod_base = OTHER; note = 2'-O-methyladenosine-3'-phosphate
agagttgccatattggacttgga

SEQ ID NO: 3863 - RNA, 23 nt, synthetic construct
  misc_feature 1..23: note = Description of Artificial Sequence: Synthetic oligonucleotide
  source 1..23: mol_type = other RNA
  modified_base 1: mod_base = OTHER; note = 2'-O-methyladenosine-3'- phosphorothioate
  modified_base 2: mod_base = OTHER; note = 2'-fluoroadenosine-3'-phosphorothioate
  modified_base 3: mod_base = OTHER; note = 2'-O-methylguanosine-3'-phosphate
  modified_base 4: mod_base = OTHER; note = 2'-O-methyladenosine-3'-phosphate
  modified_base 5: mod_base = OTHER; note = 2'-O-methylcytidine-3'-phosphate
  modified_base 6: mod_base = OTHER; note = 2'-fluorocytidine-3'-phosphate
  modified_base 7: mod_base = OTHER; note = 2'-O-methylcytidine-3'-phosphate
  modified_base 8: mod_base = OTHER; note = 2'-fluorouridine-3'-phosphate
  modified_base 9: mod_base = OTHER; note = 2'-fluorouridine-3'-phosphate
  modified_base 10: mod_base = OTHER; note = 2'-O-methyladenosine-3'-phosphate
  modified_base 11: mod_base = OTHER; note = 2'-O-methyladenosine-3'-phosphate
  modified_base 12: mod_base = OTHER; note = 2'-O-methyluridine-3'-phosphate
  modified_base 13: mod_base = OTHER; note = 2'-O-methylcytidine-3'-phosphate
  modified_base 14: mod_base = OTHER; note = 2'-fluoroadenosine-3'-phosphate
  modified_base 15: mod_base = OTHER; note = 2'-O-methyluridine-3'-phosphate
  modified_base 16: mod_base = OTHER; note = 2'-fluoroguanosine-3'-phosphate
  modified_base 17: mod_base = OTHER; note = 2'-O-methylguanosine-3'-phosphate
  modified_base 18: mod_base = OTHER; note = 2'-O-methyluridine-3'-phosphate
  modified_base 19: mod_base = OTHER; note = 2'-O-methylguanosine-3'-phosphate
  modified_base 20: mod_base = OTHER; note = 2'-O-methylguanosine-3'-phosphate
  modified_base 21: mod_base = OTHER; note = 2'-O-methyladenosine-3'- phosphorothioate
  modified_base 22: mod_base = OTHER; note = 2'-O-methyladenosine-3'- phosphorothioate
  modified_base 23: mod_base = OTHER; note = 2'-O-methyladenosine-3'-phosphate
aagacccttaatcatggtggaaa

SEQ ID NO: 3864 - RNA, 23 nt, synthetic construct
  misc_feature 1..23: note = Description of Artificial Sequence: Synthetic oligonucleotide
  source 1..23: mol_type = other RNA
  modified_base 1: mod_base = OTHER; note = 2'-O-methyluridine-3'-phosphorothioate
  modified_base 2: mod_base = OTHER; note = 2'-fluorouridine -3'-phosphorothioate
  modified_base 3: mod_base = OTHER; note = 2'-O-methyladenosine-3'-phosphate
  modified_base 4: mod_base = OTHER; note = 2'-O-methylguanosine-3'-phosphate
  modified_base 5: mod_base = OTHER; note = 2'-O-methylcytidine-3'-phosphate
  modified_base 6: mod_base = OTHER; note = 2'-fluorocytidine-3'-phosphate
  modified_base 7: mod_base = OTHER; note = 2'-O-methyluridine-3'-phosphate
  modified_base 8: mod_base = OTHER; note = 2'-fluoroadenosine-3'-phosphate
  modified_base 9: mod_base = OTHER; note = 2'-fluoroguanosine-3'-phosphate
  modified_base 10: mod_base = OTHER; note = 2'-O-methyladenosine-3'-phosphate
  modified_base 11: mod_base = OTHER; note = 2'-O-methylcytidine-3'-phosphate
  modified_base 12: mod_base = OTHER; note = 2'-O-methyladenosine-3'-phosphate
  modified_base 13: mod_base = OTHER; note = 2'-O-methylguanosine-3'-phosphate
  modified_base 14: mod_base = OTHER; note = 2'-fluorouridine-3'-phosphate
  modified_base 15: mod_base = OTHER; note = 2'-O-methylguanosine-3'-phosphate
  modified_base 16: mod_base = OTHER; note = 2'-fluoroadenosine-3'-phosphate
  modified_base 17: mod_base = OTHER; note = 2'-O-methyladenosine-3'-phosphate
  modified_base 18: mod_base = OTHER; note = 2'-O-methyladenosine-3'-phosphate
  modified_base 19: mod_base = OTHER; note = 2'-O-methyluridine-3'-phosphate
  modified_base 20: mod_base = OTHER; note = 2'-O-methylguanosine-3'-phosphate
  modified_base 21: mod_base = OTHER; note = 2'-O-methyladenosine-3'- phosphorothioate
  modified_base 22: mod_base = OTHER; note = 2'-O-methyluridine-3'-phosphorothioate
  modified_base 23: mod_base = OTHER; note = 2'-O-methyladenosine-3'-phosphate
ttagcctagacagtgaaatgata

SEQ ID NO: 3865 - RNA, 23 nt, synthetic construct
  misc_feature 1..23: note = Description of Artificial Sequence: Synthetic oligonucleotide
  source 1..23: mol_type = other RNA
  modified_base 1: mod_base = OTHER; note = 2'-O-methyladenosine-3'- phosphorothioate
  modified_base 2: mod_base = OTHER; note = 2'-fluorocytidine-3'-phosphorothioate
  modified_base 3: mod_base = OTHER; note = 2'-O-methyladenosine-3'-phosphate
  modified_base 4: mod_base = OTHER; note = 2'-O-methylguanosine-3'-phosphate
  modified_base 5: mod_base = OTHER; note = 2'-O-methyladenosine-3'-phosphate
  modified_base 6: mod_base = OTHER; note = 2'-fluorouridine-3'-phosphate
  modified_base 7: mod_base = OTHER; note = 2'-O-methylcytidine-3'-phosphate
  modified_base 8: mod_base = OTHER; note = 2'-fluoroadenosine-3'-phosphate
  modified_base 9: mod_base = OTHER; note = 2'-fluoroguanosine-3'-phosphate
  modified_base 10: mod_base = OTHER; note = 2'-O-methyladenosine-3'-phosphate
  modified_base 11: mod_base = OTHER; note = 2'-O-methyluridine-3'-phosphate
  modified_base 12: mod_base = OTHER; note = 2'-O-methyladenosine-3'-phosphate
  modified_base 13: mod_base = OTHER; note = 2'-O-methyladenosine-3'-phosphate
  modified_base 14: mod_base = OTHER; note = 2'-fluoroadenosine-3'-phosphate
  modified_base 15: mod_base = OTHER; note = 2'-O-methyladenosine-3'-phosphate
  modified_base 16: mod_base = OTHER; note = 2'-fluoroadenosine-3'-phosphate
  modified_base 17: mod_base = OTHER; note = 2'-O-methylguanosine-3'-phosphate
  modified_base 18: mod_base = OTHER; note = 2'-O-methylguanosine-3'-phosphate
  modified_base 19: mod_base = OTHER; note = 2'-O-methyladenosine-3'-phosphate
  modified_base 20: mod_base = OTHER; note = 2'-O-methylcytidine-3'-phosphate
  modified_base 21: mod_base = OTHER; note = 2'-O-methyladenosine-3'- phosphorothioate
  modified_base 22: mod_base = OTHER; note = 2'-O-methyladenosine-3'- phosphorothioate
  modified_base 23: mod_base = OTHER; note = 2'-O-methylcytidine-3'-phosphate
acagatcagataaaaaggacaac

SEQ ID NO: 3866 - RNA, 23 nt, synthetic construct
  misc_feature 1..23: note = Description of Artificial Sequence: Synthetic oligonucleotide
  source 1..23: mol_type = other RNA
  modified_base 1: mod_base = OTHER; note = 2'-O-methyluridine-3'-phosphorothioate
  modified_base 2: mod_base = OTHER; note = 2'-fluoroadenosine-3'-phosphorothioate
  modified_base 3: mod_base = OTHER; note = 2'-O-methyluridine-3'-phosphate
  modified_base 4: mod_base = OTHER; note = 2'-O-methyladenosine-3'-phosphate
  modified_base 5: mod_base = OTHER; note = 2'-O-methyluridine-3'-phosphate
  modified_base 6: mod_base = OTHER; note = 2'-fluorouridine-3'-phosphate
  modified_base 7: mod_base = OTHER; note = 2'-O-methylguanosine-3'-phosphate
  modified_base 8: mod_base = OTHER; note = 2'-fluoroguanosine-3'-phosphate
  modified_base 9: mod_base = OTHER; note = 2'-fluoroadenosine-3'-phosphate
  modified_base 10: mod_base = OTHER; note = 2'-O-methyluridine-3'-phosphate
  modified_base 11: mod_base = OTHER; note = 2'-O-methyluridine-3'-phosphate
  modified_base 12: mod_base = OTHER; note = 2'-O-methyluridine-3'-phosphate
  modified_base 13: mod_base = OTHER; note = 2'-O-methyladenosine-3'-phosphate
  modified_base 14: mod_base = OTHER; note = 2'-fluorouridine-3'-phosphate
  modified_base 15: mod_base = OTHER; note = 2'-O-methyladenosine-3'-phosphate
  modified_base 16: mod_base = OTHER; note = 2'-fluorocytidine-3'-phosphate
  modified_base 17: mod_base = OTHER; note = 2'-O-methyladenosine-3'-phosphate
  modified_base 18: mod_base = OTHER; note = 2'-O-methylcytidine-3'-phosphate
  modified_base 19: mod_base = OTHER; note = 2'-O-methyluridine-3'-phosphate
  modified_base 20: mod_base = OTHER; note = 2'-O-methylguanosine-3'-phosphate
  modified_base 21: mod_base = OTHER; note = 2'-O-methylguanosine-3'- phosphorothioate
  modified_base 22: mod_base = OTHER; note = 2'-O-methyladenosine-3'- phosphorothioate
  modified_base 23: mod_base = OTHER; note = 2'-O-methyluridine-3'-phosphate
tatattggatttatacactggat

SEQ ID NO: 3867 - RNA, 23 nt, synthetic construct
  misc_feature 1..23: note = Description of Artificial Sequence: Synthetic oligonucleotide
  source 1..23: mol_type = other RNA
  modified_base 1: mod_base = OTHER; note = 2'-O-methyluridine-3'-phosphorothioate
  modified_base 2: mod_base = OTHER; note = 2'-fluorouridine -3'-phosphorothioate
  modified_base 3: mod_base = OTHER; note = 2'-O-methyladenosine-3'-phosphate
  modified_base 4: mod_base = OTHER; note = 2'-O-methylguanosine-3'-phosphate
  modified_base 5: mod_base = OTHER; note = 2'-O-methyluridine-3'-phosphate
  modified_base 6: mod_base = OTHER; note = 2'-fluorouridine-3'-phosphate
  modified_base 7: mod_base = OTHER; note = 2'-O-methylguanosine-3'-phosphate
  modified_base 8: mod_base = OTHER; note = 2'-fluoroguanosine-3'-phosphate
  modified_base 9: mod_base = OTHER; note = 2'-fluorouridine-3'-phosphate
  modified_base 10: mod_base = OTHER; note = 2'-O-methyladenosine-3'-phosphate
  modified_base 11: mod_base = OTHER; note = 2'-O-methyluridine-3'-phosphate
  modified_base 12: mod_base = OTHER; note = 2'-O-methyladenosine-3'-phosphate
  modified_base 13: mod_base = OTHER; note = 2'-O-methyladenosine-3'-phosphate
  modified_base 14: mod_base = OTHER; note = 2'-fluorocytidine-3'-phosphate
  modified_base 15: mod_base = OTHER; note = 2'-O-methyladenosine-3'-phosphate
  modified_base 16: mod_base = OTHER; note = 2'-fluorocytidine-3'-phosphate
  modified_base 17: mod_base = OTHER; note = 2'-O-methyluridine-3'-phosphate
  modified_base 18: mod_base = OTHER; note = 2'-O-methyluridine-3'-phosphate
  modified_base 19: mod_base = OTHER; note = 2'-O-methylguanosine-3'-phosphate
  modified_base 20: mod_base = OTHER; note = 2'-O-methylguanosine-3'-phosphate
  modified_base 21: mod_base = OTHER; note = 2'-O-methyladenosine-3'- phosphorothioate
  modified_base 22: mod_base = OTHER; note = 2'-O-methyluridine-3'-phosphorothioate
  modified_base 23: mod_base = OTHER; note = 2'-O-methyladenosine-3'-phosphate
ttagttggtataacacttggata

SEQ ID NO: 3868 - RNA, 23 nt, synthetic construct
  misc_feature 1..23: note = Description of Artificial Sequence: Synthetic oligonucleotide
  source 1..23: mol_type = other RNA
  modified_base 1: mod_base = OTHER; note = 2'-O-methyluridine-3'-phosphorothioate
  modified_base 2: mod_base = OTHER; note = 2'-fluoroadenosine-3'-phosphorothioate
  modified_base 3: mod_base = OTHER; note = 2'-O-methylguanosine-3'-phosphate
  modified_base 4: mod_base = OTHER; note = 2'-O-methyladenosine-3'-phosphate
  modified_base 5: mod_base = OTHER; note = 2'-O-methylguanosine-3'-phosphate
  modified_base 6: mod_base = OTHER; note = 2'-fluoroadenosine-3'-phosphate
  modified_base 7: mod_base = OTHER; note = 2'-O-methylcytidine-3'-phosphate
  modified_base 8: mod_base = OTHER; note = 2'-fluoroadenosine-3'-phosphate
  modified_base 9: mod_base = OTHER; note = 2'-fluoroadenosine-3'-phosphate
  modified_base 10: mod_base = OTHER; note = 2'-O-methyluridine-3'-phosphate
  modified_base 11: mod_base = OTHER; note = 2'-O-methylcytidine-3'-phosphate
  modified_base 12: mod_base = OTHER; note = 2'-O-methyluridine-3'-phosphate
  modified_base 13: mod_base = OTHER; note = 2'-O-methyluridine-3'-phosphate
  modified_base 14: mod_base = OTHER; note = 2'-fluorouridine-3'-phosphate
  modified_base 15: mod_base = OTHER; note = 2'-O-methylguanosine-3'-phosphate
  modified_base 16: mod_base = OTHER; note = 2'-fluoroguanosine-3'-phosphate
  modified_base 17: mod_base = OTHER; note = 2'-O-methyluridine-3'-phosphate
  modified_base 18: mod_base = OTHER; note = 2'-O-methylguanosine-3'-phosphate
  modified_base 19: mod_base = OTHER; note = 2'-O-methyluridine-3'-phosphate
  modified_base 20: mod_base = OTHER; note = 2'-O-methyluridine-3'-phosphate
  modified_base 21: mod_base = OTHER; note = 2'-O-methylcytidine-3'- phosphorothioate
  modified_base 22: mod_base = OTHER; note = 2'-O-methyluridine-3'-phosphorothioate
  modified_base 23: mod_base = OTHER; note = 2'-O-methyladenosine-3'-phosphate
tagagacaatctttggtgttcta

SEQ ID NO: 3869 - RNA, 23 nt, synthetic construct
  misc_feature 1..23: note = Description of Artificial Sequence: Synthetic oligonucleotide
  source 1..23: mol_type = other RNA
  modified_base 1: mod_base = OTHER; note = 2'-O-methyluridine-3'-phosphorothioate
  modified_base 2: mod_base = OTHER; note = 2'-fluorocytidine-3'-phosphorothioate
  modified_base 3: mod_base = OTHER; note = 2'-O-methyladenosine-3'-phosphate
  modified_base 4: mod_base = OTHER; note = 2'-O-methylguanosine-3'-phosphate
  modified_base 5: mod_base = OTHER; note = 2'-O-methyladenosine-3'-phosphate
  modified_base 6: mod_base = OTHER; note = 2'-fluoroguanosine-3'-phosphate
  modified_base 7: mod_base = OTHER; note = 2'-O-methyladenosine-3'-phosphate
  modified_base 8: mod_base = OTHER; note = 2'-fluorocytidine-3'-phosphate
  modified_base 9: mod_base = OTHER; note = 2'-fluoroadenosine-3'-phosphate
  modified_base 10: mod_base = OTHER; note = 2'-O-methyladenosine-3'-phosphate
  modified_base 11: mod_base = OTHER; note = 2'-O-methyluridine-3'-phosphate
  modified_base 12: mod_base = OTHER; note = 2'-O-methylcytidine-3'-phosphate
  modified_base 13: mod_base = OTHER; note = 2'-O-methyluridine-3'-phosphate
  modified_base 14: mod_base = OTHER; note = 2'-fluorouridine-3'-phosphate
  modified_base 15: mod_base = OTHER; note = 2'-O-methyluridine-3'-phosphate
  modified_base 16: mod_base = OTHER; note = 2'-fluoroguanosine-3'-phosphate
  modified_base 17: mod_base = OTHER; note = 2'-O-methylguanosine-3'-phosphate
  modified_base 18: mod_base = OTHER; note = 2'-O-methyluridine-3'-phosphate
  modified_base 19: mod_base = OTHER; note = 2'-O-methylguanosine-3'-phosphate
  modified_base 20: mod_base = OTHER; note = 2'-O-methyluridine-3'-phosphate
  modified_base 21: mod_base = OTHER; note = 2'-O-methyluridine-3'-phosphorothioate
  modified_base 22: mod_base = OTHER; note = 2'-O-methylcytidine-3'- phosphorothioate
  modified_base 23: mod_base = OTHER; note = 2'-O-methyluridine-3'-phosphate
tcagagacaatctttggtgttct

SEQ ID NO: 3870 - RNA, 23 nt, synthetic construct
  misc_feature 1..23: note = Description of Artificial Sequence: Synthetic oligonucleotide
  source 1..23: mol_type = other RNA
  modified_base 1: mod_base = OTHER; note = 2'-O-methyladenosine-3'- phosphorothioate
  modified_base 2: mod_base = OTHER; note = 2'-fluorouridine -3'-phosphorothioate
  modified_base 3: mod_base = OTHER; note = 2'-O-methylcytidine-3'-phosphate
  modified_base 4: mod_base = OTHER; note = 2'-O-methyladenosine-3'-phosphate
  modified_base 5: mod_base = OTHER; note = 2'-O-methylguanosine-3'-phosphate
  modified_base 6: mod_base = OTHER; note = 2'-fluoroadenosine-3'-phosphate
  modified_base 7: mod_base = OTHER; note = 2'-O-methyluridine-3'-phosphate
  modified_base 8: mod_base = OTHER; note = 2'-fluoroadenosine-3'-phosphate
  modified_base 9: mod_base = OTHER; note = 2'-fluoroadenosine-3'-phosphate
  modified_base 10: mod_base = OTHER; note = 2'-O-methyladenosine-3'-phosphate
  modified_base 11: mod_base = OTHER; note = 2'-O-methyladenosine-3'-phosphate
  modified_base 12: mod_base = OTHER; note = 2'-O-methyladenosine-3'-phosphate
  modified_base 13: mod_base = OTHER; note = 2'-O-methylguanosine-3'-phosphate
  modified_base 14: mod_base = OTHER; note = 2'-fluoroguanosine-3'-phosphate
  modified_base 15: mod_base = OTHER; note = 2'-O-methyladenosine-3'-phosphate
  modified_base 16: mod_base = OTHER; note = 2'-fluorocytidine-3'-phosphate
  modified_base 17: mod_base = OTHER; note = 2'-O-methyladenosine-3'-phosphate
  modified_base 18: mod_base = OTHER; note = 2'-O-methyladenosine-3'-phosphate
  modified_base 19: mod_base = OTHER; note = 2'-O-methylcytidine-3'-phosphate
  modified_base 20: mod_base = OTHER; note = 2'-O-methyladenosine-3'-phosphate
  modified_base 21: mod_base = OTHER; note = 2'-O-methyluridine-3'-phosphorothioate
  modified_base 22: mod_base = OTHER; note = 2'-O-methylguanosine-3'- phosphorothioate
  modified_base 23: mod_base = OTHER; note = 2'-O-methylcytidine-3'-phosphate
atcagataaaaaggacaacatgc

SEQ ID NO: 3871 - RNA, 23 nt, synthetic construct
  misc_feature 1..23: note = Description of Artificial Sequence: Synthetic oligonucleotide
  source 1..23: mol_type = other RNA
  modified_base 1: mod_base = OTHER; note = 2'-O-methyladenosine-3'- phosphorothioate
  modified_base 2: mod_base = OTHER; note = 2'-fluorouridine -3'-phosphorothioate
  modified_base 3: mod_base = OTHER; note = 2'-O-methyluridine-3'-phosphate
  modified_base 4: mod_base = OTHER; note = 2'-O-methyluridine-3'-phosphate
  modified_base 5: mod_base = OTHER; note = 2'-O-methylcytidine-3'-phosphate
  modified_base 6: mod_base = OTHER; note = 2'-fluorouridine-3'-phosphate
  modified_base 7: mod_base = OTHER; note = 2'-O-methyladenosine-3'-phosphate
  modified_base 8: mod_base = OTHER; note = 2'-fluoroadenosine-3'-phosphate
  modified_base 9: mod_base = OTHER; note = 2'-fluorocytidine-3'-phosphate
  modified_base 10: mod_base = OTHER; note = 2'-O-methyluridine-3'-phosphate
  modified_base 11: mod_base = OTHER; note = 2'-O-methyluridine-3'-phosphate
  modified_base 12: mod_base = OTHER; note = 2'-O-methylcytidine-3'-phosphate
  modified_base 13: mod_base = OTHER; note = 2'-O-methyladenosine-3'-phosphate
  modified_base 14: mod_base = OTHER; note = 2'-fluoroguanosine-3'-phosphate
  modified_base 15: mod_base = OTHER; note = 2'-O-methylguanosine-3'-phosphate
  modified_base 16: mod_base = OTHER; note = 2'-fluoroadenosine-3'-phosphate
  modified_base 17: mod_base = OTHER; note = 2'-O-methylguanosine-3'-phosphate
  modified_base 18: mod_base = OTHER; note = 2'-O-methyluridine-3'-phosphate
  modified_base 19: mod_base = OTHER; note = 2'-O-methyluridine-3'-phosphate
  modified_base 20: mod_base = OTHER; note = 2'-O-methylguanosine-3'-phosphate
  modified_base 21: mod_base = OTHER; note = 2'-O-methyladenosine-3'- phosphorothioate
  modified_base 22: mod_base = OTHER; note = 2'-O-methyluridine-3'-phosphorothioate
  modified_base 23: mod_base = OTHER; note = 2'-O-methylguanosine-3'-phosphate
atttctaacttcaggagttgatg

SEQ ID NO: 3872 - RNA, 23 nt, synthetic construct
  misc_feature 1..23: note = Description of Artificial Sequence: Synthetic oligonucleotide
  source 1..23: mol_type = other RNA
  modified_base 1: mod_base = OTHER; note = 2'-O-methyluridine-3'-phosphorothioate
  modified_base 2: mod_base = OTHER; note = 2'-fluoroguanosine-3'-phosphorothioate
  modified_base 3: mod_base = OTHER; note = 2'-O-methylguanosine-3'-phosphate
  modified_base 4: mod_base = OTHER; note = 2'-O-methyluridine-3'-phosphate
  modified_base 5: mod_base = OTHER; note = 2'-O-methyladenosine-3'-phosphate
  modified_base 6: mod_base = OTHER; note = 2'-fluorouridine-3'-phosphate
  modified_base 7: mod_base = OTHER; note = 2'-O-methyladenosine-3'-phosphate
  modified_base 8: mod_base = OTHER; note = 2'-fluoroadenosine-3'-phosphate
  modified_base 9: mod_base = OTHER; note = 2'-fluorocytidine-3'-phosphate
  modified_base 10: mod_base = OTHER; note = 2'-O-methyladenosine-3'-phosphate
  modified_base 11: mod_base = OTHER; note = 2'-O-methylcytidine-3'-phosphate
  modified_base 12: mod_base = OTHER; note = 2'-O-methyluridine-3'-phosphate
  modified_base 13: mod_base = OTHER; note = 2'-O-methyluridine-3'-phosphate
  modified_base 14: mod_base = OTHER; note = 2'-fluoroguanosine-3'-phosphate
  modified_base 15: mod_base = OTHER; note = 2'-O-methylguanosine-3'-phosphate
  modified_base 16: mod_base = OTHER; note = 2'-fluoroadenosine-3'-phosphate
  modified_base 17: mod_base = OTHER; note = 2'-O-methyluridine-3'-phosphate
  modified_base 18: mod_base = OTHER; note = 2'-O-methyladenosine-3'-phosphate
  modified_base 19: mod_base = OTHER; note = 2'-O-methylguanosine-3'-phosphate
  modified_base 20: mod_base = OTHER; note = 2'-O-methyluridine-3'-phosphate
  modified_base 21: mod_base = OTHER; note = 2'-O-methyluridine-3'-phosphorothioate
  modified_base 22: mod_base = OTHER; note = 2'-O-methylguanosine-3'- phosphorothioate
  modified_base 23: mod_base = OTHER; note = 2'-O-methylguanosine-3'-phosphate
tggtataacacttggatagttgg

SEQ ID NO: 3873 - RNA, 23 nt, synthetic construct
  misc_feature 1..23: note = Description of Artificial Sequence: Synthetic oligonucleotide
  source 1..23: mol_type = other RNA
  modified_base 1: mod_base = OTHER; note = 2'-O-methyladenosine-3'- phosphorothioate
  modified_base 2: mod_base = OTHER; note = 2'-fluoroguanosine-3'-phosphorothioate
  modified_base 3: mod_base = OTHER; note = 2'-O-methyladenosine-3'-phosphate
  modified_base 4: mod_base = OTHER; note = 2'-O-methylcytidine-3'-phosphate
  modified_base 5: mod_base = OTHER; note = 2'-O-methyluridine-3'-phosphate
  modified_base 6: mod_base = OTHER; note = 2'-fluoroadenosine-3'-phosphate
  modified_base 7: mod_base = OTHER; note = 2'-O-methylcytidine-3'-phosphate
  modified_base 8: mod_base = OTHER; note = 2'-fluoroadenosine-3'-phosphate
  modified_base 9: mod_base = OTHER; note = 2'-fluorocytidine-3'-phosphate
  modified_base 10: mod_base = OTHER; note = 2'-O-methyladenosine-3'-phosphate
  modified_base 11: mod_base = OTHER; note = 2'-O-methyladenosine-3'-phosphate
  modified_base 12: mod_base = OTHER; note = 2'-O-methylguanosine-3'-phosphate
  modified_base 13: mod_base = OTHER; note = 2'-O-methyladenosine-3'-phosphate
  modified_base 14: mod_base = OTHER; note = 2'-fluorouridine-3'-phosphate
  modified_base 15: mod_base = OTHER; note = 2'-O-methyluridine-3'-phosphate
  modified_base 16: mod_base = OTHER; note = 2'-fluoroadenosine-3'-phosphate
  modified_base 17: mod_base = OTHER; note = 2'-O-methyladenosine-3'-phosphate
  modified_base 18: mod_base = OTHER; note = 2'-O-methyluridine-3'-phosphate
  modified_base 19: mod_base = OTHER; note = 2'-O-methyladenosine-3'-phosphate
  modified_base 20: mod_base = OTHER; note = 2'-O-methylcytidine-3'-phosphate
  modified_base 21: mod_base = OTHER; note = 2'-O-methylcytidine-3'- phosphorothioate
  modified_base 22: mod_base = OTHER; note = 2'-O-methyladenosine-3'- phosphorothioate
  modified_base 23: mod_base = OTHER; note = 2'-O-methyluridine-3'-phosphate
agactacacaagattaataccat

SEQ ID NO: 3874 - RNA, 23 nt, synthetic construct
  misc_feature 1..23: note = Description of Artificial Sequence: Synthetic oligonucleotide
  source 1..23: mol_type = other RNA
  modified_base 1: mod_base = OTHER; note = 2'-O-methyluridine-3'-phosphorothioate
  modified_base 2: mod_base = OTHER; note = 2'-fluoroguanosine-3'-phosphorothioate
  modified_base 3: mod_base = OTHER; note = 2'-O-methylcytidine-3'-phosphate
  modified_base 4: mod_base = OTHER; note = 2'-O-methyladenosine-3'-phosphate
  modified_base 5: mod_base = OTHER; note = 2'-O-methyluridine-3'-phosphate
  modified_base 6: mod_base = OTHER; note = 2'-fluoroguanosine-3'-phosphate
  modified_base 7: mod_base = OTHER; note = 2'-O-methyluridine-3'-phosphate
  modified_base 8: mod_base = OTHER; note = 2'-fluorouridine-3'-phosphate
  modified_base 9: mod_base = OTHER; note = 2'-fluorocytidine-3'-phosphate
  modified_base 10: mod_base = OTHER; note = 2'-O-methyladenosine-3'-phosphate
  modified_base 11: mod_base = OTHER; note = 2'-O-methylguanosine-3'-phosphate
  modified_base 12: mod_base = OTHER; note = 2'-O-methyluridine-3'-phosphate
  modified_base 13: mod_base = OTHER; note = 2'-O-methylguanosine-3'-phosphate
  modified_base 14: mod_base = OTHER; note = 2'-fluoroadenosine-3'-phosphate
  modified_base 15: mod_base = OTHER; note = 2'-O-methyladenosine-3'-phosphate
  modified_base 16: mod_base = OTHER; note = 2'-fluoroguanosine-3'-phosphate
  modified_base 17: mod_base = OTHER; note = 2'-O-methylguanosine-3'-phosphate
  modified_base 18: mod_base = OTHER; note = 2'-O-methyladenosine-3'-phosphate
  modified_base 19: mod_base = OTHER; note = 2'-O-methylguanosine-3'-phosphate
  modified_base 20: mod_base = OTHER; note = 2'-O-methylcytidine-3'-phosphate
  modified_base 21: mod_base = OTHER; note = 2'-O-methylcytidine-3'- phosphorothioate
  modified_base 22: mod_base = OTHER; note = 2'-O-methyladenosine-3'- phosphorothioate
  modified_base 23: mod_base = OTHER; note = 2'-O-methylguanosine-3'-phosphate
tgcatgttcagtgaaggagccag

SEQ ID NO: 3875 - RNA, 23 nt, synthetic construct
  misc_feature 1..23: note = Description of Artificial Sequence: Synthetic oligonucleotide
  source 1..23: mol_type = other RNA
  modified_base 1: mod_base = OTHER; note = 2'-O-methyluridine-3'-phosphorothioate
  modified_base 2: mod_base = OTHER; note = 2'-fluoroguanosine-3'-phosphorothioate
  modified_base 3: mod_base = OTHER; note = 2'-O-methylguanosine-3'-phosphate
  modified_base 4: mod_base = OTHER; note = 2'-O-methyluridine-3'-phosphate
  modified_base 5: mod_base = OTHER; note = 2'-O-methyladenosine-3'-phosphate
  modified_base 6: mod_base = OTHER; note = 2'-fluoroadenosine-3'-phosphate
  modified_base 7: mod_base = OTHER; note = 2'-O-methyluridine-3'-phosphate
  modified_base 8: mod_base = OTHER; note = 2'-fluoroguanosine-3'-phosphate
  modified_base 9: mod_base = OTHER; note = 2'-fluorouridine-3'-phosphate
  modified_base 10: mod_base = OTHER; note = 2'-O-methyladenosine-3'-phosphate
  modified_base 11: mod_base = OTHER; note = 2'-O-methylcytidine-3'-phosphate
  modified_base 12: mod_base = OTHER; note = 2'-O-methyladenosine-3'-phosphate
  modified_base 13: mod_base = OTHER; note = 2'-O-methylcytidine-3'-phosphate
  modified_base 14: mod_base = OTHER; note = 2'-fluorouridine-3'-phosphate
  modified_base 15: mod_base = OTHER; note = 2'-O-methyladenosine-3'-phosphate
  modified_base 16: mod_base = OTHER; note = 2'-fluorocytidine-3'-phosphate
  modified_base 17: mod_base = OTHER; note = 2'-O-methyluridine-3'-phosphate
  modified_base 18: mod_base = OTHER; note = 2'-O-methylguanosine-3'-phosphate
  modified_base 19: mod_base = OTHER; note = 2'-O-methyladenosine-3'-phosphate
  modified_base 20: mod_base = OTHER; note = 2'-O-methyluridine-3'-phosphate
  modified_base 21: mod_base = OTHER; note = 2'-O-methyladenosine-3'- phosphorothioate
  modified_base 22: mod_base = OTHER; note = 2'-O-methyluridine-3'-phosphorothioate
  modified_base 23: mod_base = OTHER; note = 2'-O-methyladenosine-3'-phosphate
tggtaatgtacactactgatata

SEQ ID NO: 3876 - RNA, 23 nt, synthetic construct
  misc_feature 1..23: note = Description of Artificial Sequence: Synthetic oligonucleotide
  source 1..23: mol_type = other RNA
  modified_base 1: mod_base = OTHER; note = 2'-O-methyluridine-3'-phosphorothioate
  modified_base 2: mod_base = OTHER; note = 2'-fluoroguanosine-3'-phosphorothioate
  modified_base 3: mod_base = OTHER; note = 2'-O-methyluridine-3'-phosphate
  modified_base 4: mod_base = OTHER; note = 2'-O-methylguanosine-3'-phosphate
  modified_base 5: mod_base = OTHER; note = 2'-O-methyluridine-3'-phosphate
  modified_base 6: mod_base = OTHER; note = 2'-fluorouridine-3'-phosphate
  modified_base 7: mod_base = OTHER; note = 2'-O-methylcytidine-3'-phosphate
  modified_base 8: mod_base = OTHER; note = 2'-fluorouridine-3'-phosphate
  modified_base 9: mod_base = OTHER; note = 2'-fluoroadenosine-3'-phosphate
  modified_base 10: mod_base = OTHER; note = 2'-O-methyladenosine-3'-phosphate
  modified_base 11: mod_base = OTHER; note = 2'-O-methylguanosine-3'-phosphate
  modified_base 12: mod_base = OTHER; note = 2'-O-methylguanosine-3'-phosphate
  modified_base 13: mod_base = OTHER; note = 2'-O-methyladenosine-3'-phosphate
  modified_base 14: mod_base = OTHER; note = 2'-fluoroadenosine-3'-phosphate
  modified_base 15: mod_base = OTHER; note = 2'-O-methyladenosine-3'-phosphate
  modified_base 16: mod_base = OTHER; note = 2'-fluoroadenosine-3'-phosphate
  modified_base 17: mod_base = OTHER; note = 2'-O-methylguanosine-3'-phosphate
  modified_base 18: mod_base = OTHER; note = 2'-O-methylguanosine-3'-phosphate
  modified_base 19: mod_base = OTHER; note = 2'-O-methylcytidine-3'-phosphate
  modified_base 20: mod_base = OTHER; note = 2'-O-methyluridine-3'-phosphate
  modified_base 21: mod_base = OTHER; note = 2'-O-methylguanosine-3'- phosphorothioate
  modified_base 22: mod_base = OTHER; note = 2'-O-methylcytidine-3'- phosphorothioate
  modified_base 23: mod_base = OTHER; note = 2'-O-methylcytidine-3'-phosphate
tgtgttctaaggaaaaggctgcc

SEQ ID NO: 3877 - RNA, 23 nt, synthetic construct
  misc_feature 1..23: note = Description of Artificial Sequence: Synthetic oligonucleotide
  source 1..23: mol_type = other RNA
  modified_base 1: mod_base = OTHER; note = 2'-O-methyluridine-3'-phosphorothioate
  modified_base 2: mod_base = OTHER; note = 2'-fluoroadenosine-3'-phosphorothioate
  modified_base 3: mod_base = OTHER; note = 2'-O-methyladenosine-3'-phosphate
  modified_base 4: mod_base = OTHER; note = 2'-O-methylcytidine-3'-phosphate
  modified_base 5: mod_base = OTHER; note = 2'-O-methyluridine-3'-phosphate
  modified_base 6: mod_base = OTHER; note = 2'-fluoroadenosine-3'-phosphate
  modified_base 7: mod_base = OTHER; note = 2'-O-methyluridine-3'-phosphate
  modified_base 8: mod_base = OTHER; note = 2'-fluorouridine-3'-phosphate
  modified_base 9: mod_base = OTHER; note = 2'-fluorouridine-3'-phosphate
  modified_base 10: mod_base = OTHER; note = 2'-O-methylcytidine-3'-phosphate
  modified_base 11: mod_base = OTHER; note = 2'-O-methyladenosine-3'-phosphate
  modified_base 12: mod_base = OTHER; note = 2'-O-methylcytidine-3'-phosphate
  modified_base 13: mod_base = OTHER; note = 2'-O-methyladenosine-3'-phosphate
  modified_base 14: mod_base = OTHER; note = 2'-fluorocytidine-3'-phosphate
  modified_base 15: mod_base = OTHER; note = 2'-O-methyluridine-3'-phosphate
  modified_base 16: mod_base = OTHER; note = 2'-fluoroadenosine-3'-phosphate
  modified_base 17: mod_base = OTHER; note = 2'-O-methyladenosine-3'-phosphate
  modified_base 18: mod_base = OTHER; note = 2'-O-methylcytidine-3'-phosphate
  modified_base 19: mod_base = OTHER; note = 2'-O-methylcytidine-3'-phosphate
  modified_base 20: mod_base = OTHER; note = 2'-O-methyladenosine-3'-phosphate
  modified_base 21: mod_base = OTHER; note = 2'-O-methylguanosine-3'- phosphorothioate
  modified_base 22: mod_base = OTHER; note = 2'-O-methyluridine-3'-phosphorothioate
  modified_base 23: mod_base = OTHER; note = 2'-O-methyluridine-3'-phosphate
taactatttcacactaaccagtt

SEQ ID NO: 3878 - RNA, 23 nt, synthetic construct
  misc_feature 1..23: note = Description of Artificial Sequence: Synthetic oligonucleotide
  source 1..23: mol_type = other RNA
  modified_base 1: mod_base = OTHER; note = 2'-O-methyladenosine-3'- phosphorothioate
  modified_base 2: mod_base = OTHER; note = 2'-fluoroadenosine-3'-phosphorothioate
  modified_base 3: mod_base = OTHER; note = 2'-O-methyluridine-3'-phosphate
  modified_base 4: mod_base = OTHER; note = 2'-O-methylguanosine-3'-phosphate
  modified_base 5: mod_base = OTHER; note = 2'-O-methyluridine-3'-phosphate
  modified_base 6: mod_base = OTHER; note = 2'-fluoroadenosine-3'-phosphate
  modified_base 7: mod_base = OTHER; note = 2'-O-methylcytidine-3'-phosphate
  modified_base 8: mod_base = OTHER; note = 2'-fluoroadenosine-3'-phosphate
  modified_base 9: mod_base = OTHER; note = 2'-fluorocytidine-3'-phosphate
  modified_base 10: mod_base = OTHER; note = 2'-O-methyluridine-3'-phosphate
  modified_base 11: mod_base = OTHER; note = 2'-O-methyladenosine-3'-phosphate
  modified_base 12: mod_base = OTHER; note = 2'-O-methylcytidine-3'-phosphate
  modified_base 13: mod_base = OTHER; note = 2'-O-methyluridine-3'-phosphate
  modified_base 14: mod_base = OTHER; note = 2'-fluoroguanosine-3'-phosphate
  modified_base 15: mod_base = OTHER; note = 2'-O-methyladenosine-3'-phosphate
  modified_base 16: mod_base = OTHER; note = 2'-fluorouridine-3'-phosphate
  modified_base 17: mod_base = OTHER; note = 2'-O-methyladenosine-3'-phosphate
  modified_base 18: mod_base = OTHER; note = 2'-O-methyluridine-3'-phosphate
  modified_base 19: mod_base = OTHER; note = 2'-O-methyladenosine-3'-phosphate
  modified_base 20: mod_base = OTHER; note = 2'-O-methylguanosine-3'-phosphate
  modified_base 21: mod_base = OTHER; note = 2'-O-methyluridine-3'-phosphorothioate
  modified_base 22: mod_base = OTHER; note = 2'-O-methyluridine-3'-phosphorothioate
  modified_base 23: mod_base = OTHER; note = 2'-O-methylcytidine-3'-phosphate
aatgtacactactgatatagttc

SEQ ID NO: 3879 - RNA, 23 nt, synthetic construct
  misc_feature 1..23: note = Description of Artificial Sequence: Synthetic oligonucleotide
  source 1..23: mol_type = other RNA
  modified_base 1: mod_base = OTHER; note = 2'-O-methyluridine-3'-phosphorothioate
  modified_base 2: mod_base = OTHER; note = 2'-fluorouridine -3'-phosphorothioate
  modified_base 3: mod_base = OTHER; note = 2'-O-methyladenosine-3'-phosphate
  modified_base 4: mod_base = OTHER; note = 2'-O-methyladenosine-3'-phosphate
  modified_base 5: mod_base = OTHER; note = 2'-O-methyluridine-3'-phosphate
  modified_base 6: mod_base = OTHER; note = 2'-fluoroguanosine-3'-phosphate
  modified_base 7: mod_base = OTHER; note = 2'-O-methyluridine-3'-phosphate
  modified_base 8: mod_base = OTHER; note = 2'-fluoroadenosine-3'-phosphate
  modified_base 9: mod_base = OTHER; note = 2'-fluorocytidine-3'-phosphate
  modified_base 10: mod_base = OTHER; note = 2'-O-methyladenosine-3'-phosphate
  modified_base 11: mod_base = OTHER; note = 2'-O-methylcytidine-3'-phosphate
  modified_base 12: mod_base = OTHER; note = 2'-O-methyluridine-3'-phosphate
  modified_base 13: mod_base = OTHER; note = 2'-O-methyladenosine-3'-phosphate
  modified_base 14: mod_base = OTHER; note = 2'-fluorocytidine-3'-phosphate
  modified_base 15: mod_base = OTHER; note = 2'-O-methyluridine-3'-phosphate
  modified_base 16: mod_base = OTHER; note = 2'-fluoroguanosine-3'-phosphate
  modified_base 17: mod_base = OTHER; note = 2'-O-methyladenosine-3'-phosphate
  modified_base 18: mod_base = OTHER; note = 2'-O-methyluridine-3'-phosphate
  modified_base 19: mod_base = OTHER; note = 2'-O-methyladenosine-3'-phosphate
  modified_base 20: mod_base = OTHER; note = 2'-O-methyluridine-3'-phosphate
  modified_base 21: mod_base = OTHER; note = 2'-O-methyladenosine-3'- phosphorothioate
  modified_base 22: mod_base = OTHER; note = 2'-O-methylguanosine-3'- phosphorothioate
  modified_base 23: mod_base = OTHER; note = 2'-O-methyluridine-3'-phosphate
ttaatgtacactactgatatagt

SEQ ID NO: 3880 - RNA, 23 nt, synthetic construct
  misc_feature 1..23: note = Description of Artificial Sequence: Synthetic oligonucleotide
  source 1..23: mol_type = other RNA
  modified_base 1: mod_base = OTHER; note = 2'-O-methyluridine-3'-phosphorothioate
  modified_base 2: mod_base = OTHER; note = 2'-fluoroadenosine-3'-phosphorothioate
  modified_base 3: mod_base = OTHER; note = 2'-O-methylguanosine-3'-phosphate
  modified_base 4: mod_base = OTHER; note = 2'-O-methyluridine-3'-phosphate
  modified_base 5: mod_base = OTHER; note = 2'-O-methylcytidine-3'-phosphate
  modified_base 6: mod_base = OTHER; note = 2'-fluorocytidine-3'-phosphate
  modified_base 7: mod_base = OTHER; note = 2'-O-methyladenosine-3'-phosphate
  modified_base 8: mod_base = OTHER; note = 2'-fluorouridine-3'-phosphate
  modified_base 9: mod_base = OTHER; note = 2'-fluorocytidine-3'-phosphate
  modified_base 10: mod_base = OTHER; note = 2'-O-methyluridine-3'-phosphate
  modified_base 11: mod_base = OTHER; note = 2'-O-methyluridine-3'-phosphate
  modified_base 12: mod_base = OTHER; note = 2'-O-methyladenosine-3'-phosphate
  modified_base 13: mod_base = OTHER; note = 2'-O-methyladenosine-3'-phosphate
  modified_base 14: mod_base = OTHER; note = 2'-fluoroadenosine-3'-phosphate
  modified_base 15: mod_base = OTHER; note = 2'-O-methyladenosine-3'-phosphate
  modified_base 16: mod_base = OTHER; note = 2'-fluorouridine-3'-phosphate
  modified_base 17: mod_base = OTHER; note = 2'-O-methyladenosine-3'-phosphate
  modified_base 18: mod_base = OTHER; note = 2'-O-methyluridine-3'-phosphate
  modified_base 19: mod_base = OTHER; note = 2'-O-methyluridine-3'-phosphate
  modified_base 20: mod_base = OTHER; note = 2'-O-methyladenosine-3'-phosphate
  modified_base 21: mod_base = OTHER; note = 2'-O-methylcytidine-3'- phosphorothioate
  modified_base 22: mod_base = OTHER; note = 2'-O-methyluridine-3'-phosphorothioate
  modified_base 23: mod_base = OTHER; note = 2'-O-methylguanosine-3'-phosphate
tagtccatcttaaaatattactg

SEQ ID NO: 3881 - RNA, 23 nt, synthetic construct
  misc_feature 1..23: note = Description of Artificial Sequence: Synthetic oligonucleotide
  source 1..23: mol_type = other RNA
  modified_base 1: mod_base = OTHER; note = 2'-O-methyluridine-3'-phosphorothioate
  modified_base 2: mod_base = OTHER; note = 2'-fluorouridine -3'-phosphorothioate
  modified_base 3: mod_base = OTHER; note = 2'-O-methyluridine-3'-phosphate
  modified_base 4: mod_base = OTHER; note = 2'-O-methyluridine-3'-phosphate
  modified_base 5: mod_base = OTHER; note = 2'-O-methylcytidine-3'-phosphate
  modified_base 6: mod_base = OTHER; note = 2'-fluorocytidine-3'-phosphate
  modified_base 7: mod_base = OTHER; note = 2'-O-methylcytidine-3'-phosphate
  modified_base 8: mod_base = OTHER; note = 2'-fluoroadenosine-3'-phosphate
  modified_base 9: mod_base = OTHER; note = 2'-fluoroguanosine-3'-phosphate
  modified_base 10: mod_base = OTHER; note = 2'-O-methyluridine-3'-phosphate
  modified_base 11: mod_base = OTHER; note = 2'-O-methylcytidine-3'-phosphate
  modified_base 12: mod_base = OTHER; note = 2'-O-methylcytidine-3'-phosphate
  modified_base 13: mod_base = OTHER; note = 2'-O-methyladenosine-3'-phosphate
  modified_base 14: mod_base = OTHER; note = 2'-fluorouridine-3'-phosphate
  modified_base 15: mod_base = OTHER; note = 2'-O-methylcytidine-3'-phosphate
  modified_base 16: mod_base = OTHER; note = 2'-fluorouridine-3'-phosphate
  modified_base 17: mod_base = OTHER; note = 2'-O-methyluridine-3'-phosphate
  modified_base 18: mod_base = OTHER; note = 2'-O-methyladenosine-3'-phosphate
  modified_base 19: mod_base = OTHER; note = 2'-O-methyladenosine-3'-phosphate
  modified_base 20: mod_base = OTHER; note = 2'-O-methyladenosine-3'-phosphate
  modified_base 21: mod_base = OTHER; note = 2'-O-methyladenosine-3'- phosphorothioate
  modified_base 22: mod_base = OTHER; note = 2'-O-methyluridine-3'-phosphorothioate
  modified_base 23: mod_base = OTHER; note = 2'-O-methyladenosine-3'-phosphate
ttttcccagtccatcttaaaata

SEQ ID NO: 3882 - RNA, 23 nt, synthetic construct
  misc_feature 1..23: note = Description of Artificial Sequence: Synthetic oligonucleotide
  source 1..23: mol_type = other RNA
  modified_base 1: mod_base = OTHER; note = 2'-O-methyluridine-3'-phosphorothioate
  modified_base 2: mod_base = OTHER; note = 2'-fluoroguanosine-3'-phosphorothioate
  modified_base 3: mod_base = OTHER; note = 2'-O-methyladenosine-3'-phosphate
  modified_base 4: mod_base = OTHER; note = 2'-O-methylcytidine-3'-phosphate
  modified_base 5: mod_base = OTHER; note = 2'-O-methyluridine-3'-phosphate
  modified_base 6: mod_base = OTHER; note = 2'-fluoroadenosine-3'-phosphate
  modified_base 7: mod_base = OTHER; note = 2'-O-methylguanosine-3'-phosphate
  modified_base 8: mod_base = OTHER; note = 2'-fluoroguanosine-3'-phosphate
  modified_base 9: mod_base = OTHER; note = 2'-fluorocytidine-3'-phosphate
  modified_base 10: mod_base = OTHER; note = 2'-O-methyladenosine-3'-phosphate
  modified_base 11: mod_base = OTHER; note = 2'-O-methyluridine-3'-phosphate
  modified_base 12: mod_base = OTHER; note = 2'-O-methylguanosine-3'-phosphate
  modified_base 13: mod_base = OTHER; note = 2'-O-methyluridine-3'-phosphate
  modified_base 14: mod_base = OTHER; note = 2'-fluorouridine-3'-phosphate
  modified_base 15: mod_base = OTHER; note = 2'-O-methylcytidine-3'-phosphate
  modified_base 16: mod_base = OTHER; note = 2'-fluoroadenosine-3'-phosphate
  modified_base 17: mod_base = OTHER; note = 2'-O-methylguanosine-3'-phosphate
  modified_base 18: mod_base = OTHER; note = 2'-O-methyluridine-3'-phosphate
  modified_base 19: mod_base = OTHER; note = 2'-O-methylguanosine-3'-phosphate
  modified_base 20: mod_base = OTHER; note = 2'-O-methyladenosine-3'-phosphate
  modified_base 21: mod_base = OTHER; note = 2'-O-methyladenosine-3'- phosphorothioate
  modified_base 22: mod_base = OTHER; note = 2'-O-methylguanosine-3'- phosphorothioate
  modified_base 23: mod_base = OTHER; note = 2'-O-methylguanosine-3'-phosphate
tgactaggcatgttcagtgaagg

SEQ ID NO: 3883 - RNA, 23 nt, synthetic construct
  misc_feature 1..23: note = Description of Artificial Sequence: Synthetic oligonucleotide
  source 1..23: mol_type = other RNA
  modified_base 1: mod_base = OTHER; note = 2'-O-methyluridine-3'-phosphorothioate
  modified_base 2: mod_base = OTHER; note = 2'-fluoroadenosine-3'-phosphorothioate
  modified_base 3: mod_base = OTHER; note = 2'-O-methyluridine-3'-phosphate
  modified_base 4: mod_base = OTHER; note = 2'-O-methyladenosine-3'-phosphate
  modified_base 5: mod_base = OTHER; note = 2'-O-methyladenosine-3'-phosphate
  modified_base 6: mod_base = OTHER; note = 2'-fluorocytidine-3'-phosphate
  modified_base 7: mod_base = OTHER; note = 2'-O-methyladenosine-3'-phosphate
  modified_base 8: mod_base = OTHER; note = 2'-fluorocytidine-3'-phosphate
  modified_base 9: mod_base = OTHER; note = 2'-fluorouridine-3'-phosphate
  modified_base 10: mod_base = OTHER; note = 2'-O-methyluridine-3'-phosphate
  modified_base 11: mod_base = OTHER; note = 2'-O-methylguanosine-3'-phosphate
  modified_base 12: mod_base = OTHER; note = 2'-O-methylguanosine-3'-phosphate
  modified_base 13: mod_base = OTHER; note = 2'-O-methyladenosine-3'-phosphate
  modified_base 14: mod_base = OTHER; note = 2'-fluorouridine-3'-phosphate
  modified_base 15: mod_base = OTHER; note = 2'-O-methyladenosine-3'-phosphate
  modified_base 16: mod_base = OTHER; note = 2'-fluoroguanosine-3'-phosphate
  modified_base 17: mod_base = OTHER; note = 2'-O-methyluridine-3'-phosphate
  modified_base 18: mod_base = OTHER; note = 2'-O-methyluridine-3'-phosphate
  modified_base 19: mod_base = OTHER; note = 2'-O-methylguanosine-3'-phosphate
  modified_base 20: mod_base = OTHER; note = 2'-O-methylguanosine-3'-phosphate
  modified_base 21: mod_base = OTHER; note = 2'-O-methyluridine-3'-phosphorothioate
  modified_base 22: mod_base = OTHER; note = 2'-O-methyluridine-3'-phosphorothioate
  modified_base 23: mod_base = OTHER; note = 2'-O-methylguanosine-3'-phosphate
tataacacttggatagttggttg

SEQ ID NO: 3884 - RNA, 23 nt, synthetic construct
  misc_feature 1..23: note = Description of Artificial Sequence: Synthetic oligonucleotide
  source 1..23: mol_type = other RNA
  modified_base 1: mod_base = OTHER; note = 2'-O-methyluridine-3'-phosphorothioate
  modified_base 2: mod_base = OTHER; note = 2'-fluorouridine -3'-phosphorothioate
  modified_base 3: mod_base = OTHER; note = 2'-O-methyluridine-3'-phosphate
  modified_base 4: mod_base = OTHER; note = 2'-O-methyladenosine-3'-phosphate
  modified_base 5: mod_base = OTHER; note = 2'-O-methylguanosine-3'-phosphate
  modified_base 6: mod_base = OTHER; note = 2'-fluorouridine-3'-phosphate
  modified_base 7: mod_base = OTHER; note = 2'-O-methyluridine-3'-phosphate
  modified_base 8: mod_base = OTHER; note = 2'-fluoroguanosine-3'-phosphate
  modified_base 9: mod_base = OTHER; note = 2'-fluoroguanosine-3'-phosphate
  modified_base 10: mod_base = OTHER; note = 2'-O-methyluridine-3'-phosphate
  modified_base 11: mod_base = OTHER; note = 2'-O-methyladenosine-3'-phosphate
  modified_base 12: mod_base = OTHER; note = 2'-O-methyluridine-3'-phosphate
  modified_base 13: mod_base = OTHER; note = 2'-O-methyladenosine-3'-phosphate
  modified_base 14: mod_base = OTHER; note = 2'-fluoroadenosine-3'-phosphate
  modified_base 15: mod_base = OTHER; note = 2'-O-methylcytidine-3'-phosphate
  modified_base 16: mod_base = OTHER; note = 2'-fluoroadenosine-3'-phosphate
  modified_base 17: mod_base = OTHER; note = 2'-O-methylcytidine-3'-phosphate
  modified_base 18: mod_base = OTHER; note = 2'-O-methyluridine-3'-phosphate
  modified_base 19: mod_base = OTHER; note = 2'-O-methyluridine-3'-phosphate
  modified_base 20: mod_base = OTHER; note = 2'-O-methylguanosine-3'-phosphate
  modified_base 21: mod_base = OTHER; note = 2'-O-methylguanosine-3'- phosphorothioate
  modified_base 22: mod_base = OTHER; note = 2'-O-methyladenosine-3'- phosphorothioate
  modified_base 23: mod_base = OTHER; note = 2'-O-methyluridine-3'-phosphate
tttagttggtataacacttggat

SEQ ID NO: 3885 - RNA, 23 nt, synthetic construct
  misc_feature 1..23: note = Description of Artificial Sequence: Synthetic oligonucleotide
  source 1..23: mol_type = other RNA
  modified_base 1: mod_base = OTHER; note = 2'-O-methyladenosine-3'- phosphorothioate
  modified_base 2: mod_base = OTHER; note = 2'-fluoroguanosine-3'-phosphorothioate
  modified_base 3: mod_base = OTHER; note = 2'-O-methyluridine-3'-phosphate
  modified_base 4: mod_base = OTHER; note = 2'-O-methylcytidine-3'-phosphate
  modified_base 5: mod_base = OTHER; note = 2'-O-methylcytidine-3'-phosphate
  modified_base 6: mod_base = OTHER; note = 2'-fluoroadenosine-3'-phosphate
  modified_base 7: mod_base = OTHER; note = 2'-O-methyluridine-3'-phosphate
  modified_base 8: mod_base = OTHER; note = 2'-fluorocytidine-3'-phosphate
  modified_base 9: mod_base = OTHER; note = 2'-fluorouridine-3'-phosphate
  modified_base 10: mod_base = OTHER; note = 2'-O-methyluridine-3'-phosphate
  modified_base 11: mod_base = OTHER; note = 2'-O-methyladenosine-3'-phosphate
  modified_base 12: mod_base = OTHER; note = 2'-O-methyladenosine-3'-phosphate
  modified_base 13: mod_base = OTHER; note = 2'-O-methyladenosine-3'-phosphate
  modified_base 14: mod_base = OTHER; note = 2'-fluoroadenosine-3'-phosphate
  modified_base 15: mod_base = OTHER; note = 2'-O-methyluridine-3'-phosphate
  modified_base 16: mod_base = OTHER; note = 2'-fluoroadenosine-3'-phosphate
  modified_base 17: mod_base = OTHER; note = 2'-O-methyluridine-3'-phosphate
  modified_base 18: mod_base = OTHER; note = 2'-O-methyluridine-3'-phosphate
  modified_base 19: mod_base = OTHER; note = 2'-O-methyladenosine-3'-phosphate
  modified_base 20: mod_base = OTHER; note = 2'-O-methylcytidine-3'-phosphate
  modified_base 21: mod_base = OTHER; note = 2'-O-methyluridine-3'-phosphorothioate
  modified_base 22: mod_base = OTHER; note = 2'-O-methylguanosine-3'- phosphorothioate
  modified_base 23: mod_base = OTHER; note = 2'-O-methylcytidine-3'-phosphate
agtccatcttaaaatattactgc

SEQ ID NO: 3886 - RNA, 23 nt, synthetic construct
  misc_feature 1..23: note = Description of Artificial Sequence: Synthetic oligonucleotide
  source 1..23: mol_type = other RNA
  modified_base 1: mod_base = OTHER; note = 2'-O-methyluridine-3'-phosphorothioate
  modified_base 2: mod_base = OTHER; note = 2'-fluoroadenosine-3'-phosphorothioate
  modified_base 3: mod_base = OTHER; note = 2'-O-methylguanosine-3'-phosphate
  modified_base 4: mod_base = OTHER; note = 2'-O-methylguanosine-3'-phosphate
  modified_base 5: mod_base = OTHER; note = 2'-O-methyladenosine-3'-phosphate
  modified_base 6: mod_base = OTHER; note = 2'-fluorouridine-3'-phosphate
  modified_base 7: mod_base = OTHER; note = 2'-O-methyladenosine-3'-phosphate
  modified_base 8: mod_base = OTHER; note = 2'-fluorouridine-3'-phosphate
  modified_base 9: mod_base = OTHER; note = 2'-fluoroadenosine-3'-phosphate
  modified_base 10: mod_base = OTHER; note = 2'-O-methylguanosine-3'-phosphate
  modified_base 11: mod_base = OTHER; note = 2'-O-methylcytidine-3'-phosphate
  modified_base 12: mod_base = OTHER; note = 2'-O-methyluridine-3'-phosphate
  modified_base 13: mod_base = OTHER; note = 2'-O-methylguanosine-3'-phosphate
  modified_base 14: mod_base = OTHER; note = 2'-fluorouridine-3'-phosphate
  modified_base 15: mod_base = OTHER; note = 2'-O-methylguanosine-3'-phosphate
  modified_base 16: mod_base = OTHER; note = 2'-fluoroguanosine-3'-phosphate
  modified_base 17: mod_base = OTHER; note = 2'-O-methyladenosine-3'-phosphate
  modified_base 18: mod_base = OTHER; note = 2'-O-methyluridine-3'-phosphate
  modified_base 19: mod_base = OTHER; note = 2'-O-methyluridine-3'-phosphate
  modified_base 20: mod_base = OTHER; note = 2'-O-methyluridine-3'-phosphate
  modified_base 21: mod_base = OTHER; note = 2'-O-methyluridine-3'-phosphorothioate
  modified_base 22: mod_base = OTHER; note = 2'-O-methyladenosine-3'- phosphorothioate
  modified_base 23: mod_base = OTHER; note = 2'-O-methylcytidine-3'-phosphate
taggatatagctgtggattttac

SEQ ID NO: 3887 - RNA, 23 nt, synthetic construct
  misc_feature 1..23: note = Description of Artificial Sequence: Synthetic oligonucleotide
  source 1..23: mol_type = other RNA
  modified_base 1: mod_base = OTHER; note = 2'-O-methyluridine-3'-phosphorothioate
  modified_base 2: mod_base = OTHER; note = 2'-fluorouridine -3'-phosphorothioate
  modified_base 3: mod_base = OTHER; note = 2'-O-methyladenosine-3'-phosphate
  modified_base 4: mod_base = OTHER; note = 2'-O-methylguanosine-3'-phosphate
  modified_base 5: mod_base = OTHER; note = 2'-O-methylguanosine-3'-phosphate
  modified_base 6: mod_base = OTHER; note = 2'-fluorocytidine-3'-phosphate
  modified_base 7: mod_base = OTHER; note = 2'-O-methyladenosine-3'-phosphate
  modified_base 8: mod_base = OTHER; note = 2'-fluorouridine-3'-phosphate
  modified_base 9: mod_base = OTHER; note = 2'-fluoroguanosine-3'-phosphate
  modified_base 10: mod_base = OTHER; note = 2'-O-methyluridine-3'-phosphate
  modified_base 11: mod_base = OTHER; note = 2'-O-methyluridine-3'-phosphate
  modified_base 12: mod_base = OTHER; note = 2'-O-methylcytidine-3'-phosphate
  modified_base 13: mod_base = OTHER; note = 2'-O-methyladenosine-3'-phosphate
  modified_base 14: mod_base = OTHER; note = 2'-fluoroguanosine-3'-phosphate
  modified_base 15: mod_base = OTHER; note = 2'-O-methyluridine-3'-phosphate
  modified_base 16: mod_base = OTHER; note = 2'-fluoroguanosine-3'-phosphate
  modified_base 17: mod_base = OTHER; note = 2'-O-methyladenosine-3'-phosphate
  modified_base 18: mod_base = OTHER; note = 2'-O-methyladenosine-3'-phosphate
  modified_base 19: mod_base = OTHER; note = 2'-O-methylguanosine-3'-phosphate
  modified_base 20: mod_base = OTHER; note = 2'-O-methylguanosine-3'-phosphate
  modified_base 21: mod_base = OTHER; note = 2'-O-methyladenosine-3'- phosphorothioate
  modified_base 22: mod_base = OTHER; note = 2'-O-methylguanosine-3'- phosphorothioate
  modified_base 23: mod_base = OTHER; note = 2'-O-methylcytidine-3'-phosphate
ttaggcatgttcagtgaaggagc

SEQ ID NO: 3888 - RNA, 23 nt, synthetic construct
  misc_feature 1..23: note = Description of Artificial Sequence: Synthetic oligonucleotide
  source 1..23: mol_type = other RNA
  modified_base 1: mod_base = OTHER; note = 2'-O-methyluridine-3'-phosphorothioate
  modified_base 2: mod_base = OTHER; note = 2'-fluorouridine -3'-phosphorothioate
  modified_base 3: mod_base = OTHER; note = 2'-O-methylguanosine-3'-phosphate
  modified_base 4: mod_base = OTHER; note = 2'-O-methylguanosine-3'-phosphate
  modified_base 5: mod_base = OTHER; note = 2'-O-methyladenosine-3'-phosphate
  modified_base 6: mod_base = OTHER; note = 2'-fluorocytidine-3'-phosphate
  modified_base 7: mod_base = OTHER; note = 2'-O-methyluridine-3'-phosphate
  modified_base 8: mod_base = OTHER; note = 2'-fluoroadenosine-3'-phosphate
  modified_base 9: mod_base = OTHER; note = 2'-fluoroguanosine-3'-phosphate
  modified_base 10: mod_base = OTHER; note = 2'-O-methylguanosine-3'-phosphate
  modified_base 11: mod_base = OTHER; note = 2'-O-methylcytidine-3'-phosphate
  modified_base 12: mod_base = OTHER; note = 2'-O-methyladenosine-3'-phosphate
  modified_base 13: mod_base = OTHER; note = 2'-O-methyluridine-3'-phosphate
  modified_base 14: mod_base = OTHER; note = 2'-fluoroguanosine-3'-phosphate
  modified_base 15: mod_base = OTHER; note = 2'-O-methyluridine-3'-phosphate
  modified_base 16: mod_base = OTHER; note = 2'-fluorouridine-3'-phosphate
  modified_base 17: mod_base = OTHER; note = 2'-O-methylcytidine-3'-phosphate
  modified_base 18: mod_base = OTHER; note = 2'-O-methyladenosine-3'-phosphate
  modified_base 19: mod_base = OTHER; note = 2'-O-methylguanosine-3'-phosphate
  modified_base 20: mod_base = OTHER; note = 2'-O-methyluridine-3'-phosphate
  modified_base 21: mod_base = OTHER; note = 2'-O-methylguanosine-3'- phosphorothioate
  modified_base 22: mod_base = OTHER; note = 2'-O-methyladenosine-3'- phosphorothioate
  modified_base 23: mod_base = OTHER; note = 2'-O-methyladenosine-3'-phosphate
ttggactaggcatgttcagtgaa

SEQ ID NO: 3889 - RNA, 23 nt, synthetic construct
  misc_feature 1..23: note = Description of Artificial Sequence: Synthetic oligonucleotide
  source 1..23: mol_type = other RNA
  modified_base 1: mod_base = OTHER; note = 2'-O-methylguanosine-3'- phosphorothioate
  modified_base 2: mod_base = OTHER; note = 2'-fluorouridine -3'-phosphorothioate
  modified_base 3: mod_base = OTHER; note = 2'-O-methyluridine-3'-phosphate
  modified_base 4: mod_base = OTHER; note = 2'-O-methyluridine-3'-phosphate
  modified_base 5: mod_base = OTHER; note = 2'-O-methyluridine-3'-phosphate
  modified_base 6: mod_base = OTHER; note = 2'-fluoroadenosine-3'-phosphate
  modified_base 7: mod_base = OTHER; note = 2'-O-methylguanosine-3'-phosphate
  modified_base 8: mod_base = OTHER; note = 2'-fluorouridine-3'-phosphate
  modified_base 9: mod_base = OTHER; note = 2'-fluorouridine-3'-phosphate
  modified_base 10: mod_base = OTHER; note = 2'-O-methylguanosine-3'-phosphate
  modified_base 11: mod_base = OTHER; note = 2'-O-methylguanosine-3'-phosphate
  modified_base 12: mod_base = OTHER; note = 2'-O-methyluridine-3'-phosphate
  modified_base 13: mod_base = OTHER; note = 2'-O-methyladenosine-3'-phosphate
  modified_base 14: mod_base = OTHER; note = 2'-fluorouridine-3'-phosphate
  modified_base 15: mod_base = OTHER; note = 2'-O-methyladenosine-3'-phosphate
  modified_base 16: mod_base = OTHER; note = 2'-fluoroadenosine-3'-phosphate
  modified_base 17: mod_base = OTHER; note = 2'-O-methylcytidine-3'-phosphate
  modified_base 18: mod_base = OTHER; note = 2'-O-methyladenosine-3'-phosphate
  modified_base 19: mod_base = OTHER; note = 2'-O-methylcytidine-3'-phosphate
  modified_base 20: mod_base = OTHER; note = 2'-O-methyluridine-3'-phosphate
  modified_base 21: mod_base = OTHER; note = 2'-O-methyluridine-3'-phosphorothioate
  modified_base 22: mod_base = OTHER; note = 2'-O-methylguanosine-3'- phosphorothioate
  modified_base 23: mod_base = OTHER; note = 2'-O-methylguanosine-3'-phosphate
gttttagttggtataacacttgg

SEQ ID NO: 3890 - RNA, 23 nt, synthetic construct
  misc_feature 1..23: note = Description of Artificial Sequence: Synthetic oligonucleotide
  source 1..23: mol_type = other RNA
  modified_base 1: mod_base = OTHER; note = 2'-O-methyladenosine-3'- phosphorothioate
  modified_base 2: mod_base = OTHER; note = 2'-fluoroguanosine-3'-phosphorothioate
  modified_base 3: mod_base = OTHER; note = 2'-O-methyladenosine-3'-phosphate
  modified_base 4: mod_base = OTHER; note = 2'-O-methylcytidine-3'-phosphate
  modified_base 5: mod_base = OTHER; note = 2'-O-methylcytidine-3'-phosphate
  modified_base 6: mod_base = OTHER; note = 2'-fluorocytidine-3'-phosphate
  modified_base 7: mod_base = OTHER; note = 2'-O-methyluridine-3'-phosphate
  modified_base 8: mod_base = OTHER; note = 2'-fluorouridine-3'-phosphate
  modified_base 9: mod_base = OTHER; note = 2'-fluoroadenosine-3'-phosphate
  modified_base 10: mod_base = OTHER; note = 2'-O-methyladenosine-3'-phosphate
  modified_base 11: mod_base = OTHER; note = 2'-O-methyluridine-3'-phosphate
  modified_base 12: mod_base = OTHER; note = 2'-O-methylcytidine-3'-phosphate
  modified_base 13: mod_base = OTHER; note = 2'-O-methyladenosine-3'-phosphate
  modified_base 14: mod_base = OTHER; note = 2'-fluorouridine-3'-phosphate
  modified_base 15: mod_base = OTHER; note = 2'-O-methylguanosine-3'-phosphate
  modified_base 16: mod_base = OTHER; note = 2'-fluoroguanosine-3'-phosphate
  modified_base 17: mod_base = OTHER; note = 2'-O-methyluridine-3'-phosphate
  modified_base 18: mod_base = OTHER; note = 2'-O-methylguanosine-3'-phosphate
  modified_base 19: mod_base = OTHER; note = 2'-O-methylguanosine-3'-phosphate
  modified_base 20: mod_base = OTHER; note = 2'-O-methyladenosine-3'-phosphate
  modified_base 21: mod_base = OTHER; note = 2'-O-methyladenosine-3'- phosphorothioate
  modified_base 22: mod_base = OTHER; note = 2'-O-methyladenosine-3'- phosphorothioate
  modified_base 23: mod_base = OTHER; note = 2'-O-methylcytidine-3'-phosphate
agacccttaatcatggtggaaac

SEQ ID NO: 3891 - RNA, 23 nt, synthetic construct
  misc_feature 1..23: note = Description of Artificial Sequence: Synthetic oligonucleotide
  source 1..23: mol_type = other RNA
  modified_base 1: mod_base = OTHER; note = 2'-O-methyladenosine-3'- phosphorothioate
  modified_base 2: mod_base = OTHER; note = 2'-fluoroadenosine-3'-phosphorothioate
  modified_base 3: mod_base = OTHER; note = 2'-O-methyluridine-3'-phosphate
  modified_base 4: mod_base = OTHER; note = 2'-O-methylguanosine-3'-phosphate
  modified_base 5: mod_base = OTHER; note = 2'-O-methyluridine-3'-phosphate
  modified_base 6: mod_base = OTHER; note = 2'-fluorouridine-3'-phosphate
  modified_base 7: mod_base = OTHER; note = 2'-O-methylguanosine-3'-phosphate
  modified_base 8: mod_base = OTHER; note = 2'-fluoroguanosine-3'-phosphate
  modified_base 9: mod_base = OTHER; note = 2'-fluoroadenosine-3'-phosphate
  modified_base 10: mod_base = OTHER; note = 2'-O-methylcytidine-3'-phosphate
  modified_base 11: mod_base = OTHER; note = 2'-O-methyluridine-3'-phosphate
  modified_base 12: mod_base = OTHER; note = 2'-O-methyladenosine-3'-phosphate
  modified_base 13: mod_base = OTHER; note = 2'-O-methylguanosine-3'-phosphate
  modified_base 14: mod_base = OTHER; note = 2'-fluoroguanosine-3'-phosphate
  modified_base 15: mod_base = OTHER; note = 2'-O-methylcytidine-3'-phosphate
  modified_base 16: mod_base = OTHER; note = 2'-fluoroadenosine-3'-phosphate
  modified_base 17: mod_base = OTHER; note = 2'-O-methyluridine-3'-phosphate
  modified_base 18: mod_base = OTHER; note = 2'-O-methylguanosine-3'-phosphate
  modified_base 19: mod_base = OTHER; note = 2'-O-methyluridine-3'-phosphate
  modified_base 20: mod_base = OTHER; note = 2'-O-methyluridine-3'-phosphate
  modified_base 21: mod_base = OTHER; note = 2'-O-methylcytidine-3'- phosphorothioate
  modified_base 22: mod_base = OTHER; note = 2'-O-methyladenosine-3'- phosphorothioate
  modified_base 23: mod_base = OTHER; note = 2'-O-methylguanosine-3'-phosphate
aatgttggactaggcatgttcag

SEQ ID NO: 3892 - RNA, 23 nt, synthetic construct
  misc_feature 1..23: note = Description of Artificial Sequence: Synthetic oligonucleotide
  source 1..23: mol_type = other RNA
  modified_base 1: mod_base = OTHER; note = 2'-O-methyladenosine-3'- phosphorothioate
  modified_base 2: mod_base = OTHER; note = 2'-fluorouridine -3'-phosphorothioate
  modified_base 3: mod_base = OTHER; note = 2'-O-methylguanosine-3'-phosphate
  modified_base 4: mod_base = OTHER; note = 2'-O-methylguanosine-3'-phosphate
  modified_base 5: mod_base = OTHER; note = 2'-O-methyluridine-3'-phosphate
  modified_base 6: mod_base = OTHER; note = 2'-fluoroadenosine-3'-phosphate
  modified_base 7: mod_base = OTHER; note = 2'-O-methyladenosine-3'-phosphate
  modified_base 8: mod_base = OTHER; note = 2'-fluorouridine-3'-phosphate
  modified_base 9: mod_base = OTHER; note = 2'-fluoroguanosine-3'-phosphate
  modified_base 10: mod_base = OTHER; note = 2'-O-methyluridine-3'-phosphate
  modified_base 11: mod_base = OTHER; note = 2'-O-methyladenosine-3'-phosphate
  modified_base 12: mod_base = OTHER; note = 2'-O-methylcytidine-3'-phosphate
  modified_base 13: mod_base = OTHER; note = 2'-O-methyladenosine-3'-phosphate
  modified_base 14: mod_base = OTHER; note = 2'-fluorocytidine-3'-phosphate
  modified_base 15: mod_base = OTHER; note = 2'-O-methyluridine-3'-phosphate
  modified_base 16: mod_base = OTHER; note = 2'-fluoroadenosine-3'-phosphate
  modified_base 17: mod_base = OTHER; note = 2'-O-methylcytidine-3'-phosphate
  modified_base 18: mod_base = OTHER; note = 2'-O-methyluridine-3'-phosphate
  modified_base 19: mod_base = OTHER; note = 2'-O-methylguanosine-3'-phosphate
  modified_base 20: mod_base = OTHER; note = 2'-O-methyladenosine-3'-phosphate
  modified_base 21: mod_base = OTHER; note = 2'-O-methyluridine-3'-phosphorothioate
  modified_base 22: mod_base = OTHER; note = 2'-O-methyladenosine-3'- phosphorothioate
  modified_base 23: mod_base = OTHER; note = 2'-O-methyluridine-3'-phosphate
atggtaatgtacactactgatat

SEQ ID NO: 3893 - RNA, 23 nt, synthetic construct
  misc_feature 1..23: note = Description of Artificial Sequence: Synthetic oligonucleotide
  source 1..23: mol_type = other RNA
  modified_base 1: mod_base = OTHER; note = 2'-O-methyluridine-3'-phosphorothioate
  modified_base 2: mod_base = OTHER; note = 2'-fluoroadenosine-3'-phosphorothioate
  modified_base 3: mod_base = OTHER; note = 2'-O-methylguanosine-3'-phosphate
  modified_base 4: mod_base = OTHER; note = 2'-O-methyluridine-3'-phosphate
  modified_base 5: mod_base = OTHER; note = 2'-O-methyluridine-3'-phosphate
  modified_base 6: mod_base = OTHER; note = 2'-fluoroguanosine-3'-phosphate
  modified_base 7: mod_base = OTHER; note = 2'-O-methylguanosine-3'-phosphate
  modified_base 8: mod_base = OTHER; note = 2'-fluorouridine-3'-phosphate
  modified_base 9: mod_base = OTHER; note = 2'-fluoroadenosine-3'-phosphate
  modified_base 10: mod_base = OTHER; note = 2'-O-methyluridine-3'-phosphate
  modified_base 11: mod_base = OTHER; note = 2'-O-methyladenosine-3'-phosphate
  modified_base 12: mod_base = OTHER; note = 2'-O-methyladenosine-3'-phosphate
  modified_base 13: mod_base = OTHER; note = 2'-O-methylcytidine-3'-phosphate
  modified_base 14: mod_base = OTHER; note = 2'-fluoroadenosine-3'-phosphate
  modified_base 15: mod_base = OTHER; note = 2'-O-methylcytidine-3'-phosphate
  modified_base 16: mod_base = OTHER; note = 2'-fluorouridine-3'-phosphate
  modified_base 17: mod_base = OTHER; note = 2'-O-methyluridine-3'-phosphate
  modified_base 18: mod_base = OTHER; note = 2'-O-methylguanosine-3'-phosphate
  modified_base 19: mod_base = OTHER; note = 2'-O-methylguanosine-3'-phosphate
  modified_base 20: mod_base = OTHER; note = 2'-O-methyladenosine-3'-phosphate
  modified_base 21: mod_base = OTHER; note = 2'-O-methyluridine-3'-phosphorothioate
  modified_base 22: mod_base = OTHER; note = 2'-O-methyladenosine-3'- phosphorothioate
  modified_base 23: mod_base = OTHER; note = 2'-O-methylguanosine-3'-phosphate
tagttggtataacacttggatag

SEQ ID NO: 3894 - RNA, 23 nt, synthetic construct
  misc_feature 1..23: note = Description of Artificial Sequence: Synthetic oligonucleotide
  source 1..23: mol_type = other RNA
  modified_base 1: mod_base = OTHER; note = 2'-O-methyluridine-3'-phosphorothioate
  modified_base 2: mod_base = OTHER; note = 2'-fluoroadenosine-3'-phosphorothioate
  modified_base 3: mod_base = OTHER; note = 2'-O-methylguanosine-3'-phosphate
  modified_base 4: mod_base = OTHER; note = 2'-O-methyluridine-3'-phosphate
  modified_base 5: mod_base = OTHER; note = 2'-O-methyluridine-3'-phosphate
  modified_base 6: mod_base = OTHER; note = 2'-fluoroguanosine-3'-phosphate
  modified_base 7: mod_base = OTHER; note = 2'-O-methylcytidine-3'-phosphate
  modified_base 8: mod_base = OTHER; note = 2'-fluorocytidine-3'-phosphate
  modified_base 9: mod_base = OTHER; note = 2'-fluoroadenosine-3'-phosphate
  modified_base 10: mod_base = OTHER; note = 2'-O-methyluridine-3'-phosphate
  modified_base 11: mod_base = OTHER; note = 2'-O-methyladenosine-3'-phosphate
  modified_base 12: mod_base = OTHER; note = 2'-O-methyluridine-3'-phosphate
  modified_base 13: mod_base = OTHER; note = 2'-O-methyluridine-3'-phosphate
  modified_base 14: mod_base = OTHER; note = 2'-fluoroguanosine-3'-phosphate
  modified_base 15: mod_base = OTHER; note = 2'-O-methylguanosine-3'-phosphate
  modified_base 16: mod_base = OTHER; note = 2'-fluoroadenosine-3'-phosphate
  modified_base 17: mod_base = OTHER; note = 2'-O-methylcytidine-3'-phosphate
  modified_base 18: mod_base = OTHER; note = 2'-O-methyluridine-3'-phosphate
  modified_base 19: mod_base = OTHER; note = 2'-O-methyluridine-3'-phosphate
  modified_base 20: mod_base = OTHER; note = 2'-O-methylguanosine-3'-phosphate
  modified_base 21: mod_base = OTHER; note = 2'-O-methylguanosine-3'- phosphorothioate
  modified_base 22: mod_base = OTHER; note = 2'-O-methyladenosine-3'- phosphorothioate
  modified_base 23: mod_base = OTHER; note = 2'-O-methyladenosine-3'-phosphate
tagttgccatattggacttggaa

SEQ ID NO: 3895 - RNA, 23 nt, synthetic construct
  misc_feature 1..23: note = Description of Artificial Sequence: Synthetic oligonucleotide
  source 1..23: mol_type = other RNA
  modified_base 1: mod_base = OTHER; note = 2'-O-methyluridine-3'-phosphorothioate
  modified_base 2: mod_base = OTHER; note = 2'-fluoroguanosine-3'-phosphorothioate
  modified_base 3: mod_base = OTHER; note = 2'-O-methyluridine-3'-phosphate
  modified_base 4: mod_base = OTHER; note = 2'-O-methyladenosine-3'-phosphate
  modified_base 5: mod_base = OTHER; note = 2'-O-methylguanosine-3'-phosphate
  modified_base 6: mod_base = OTHER; note = 2'-fluorocytidine-3'-phosphate
  modified_base 7: mod_base = OTHER; note = 2'-O-methylcytidine-3'-phosphate
  modified_base 8: mod_base = OTHER; note = 2'-fluorouridine-3'-phosphate
  modified_base 9: mod_base = OTHER; note = 2'-fluoroadenosine-3'-phosphate
  modified_base 10: mod_base = OTHER; note = 2'-O-methylguanosine-3'-phosphate
  modified_base 11: mod_base = OTHER; note = 2'-O-methyladenosine-3'-phosphate
  modified_base 12: mod_base = OTHER; note = 2'-O-methylcytidine-3'-phosphate
  modified_base 13: mod_base = OTHER; note = 2'-O-methyladenosine-3'-phosphate
  modified_base 14: mod_base = OTHER; note = 2'-fluoroguanosine-3'-phosphate
  modified_base 15: mod_base = OTHER; note = 2'-O-methyluridine-3'-phosphate
  modified_base 16: mod_base = OTHER; note = 2'-fluoroguanosine-3'-phosphate
  modified_base 17: mod_base = OTHER; note = 2'-O-methyladenosine-3'-phosphate
  modified_base 18: mod_base = OTHER; note = 2'-O-methyladenosine-3'-phosphate
  modified_base 19: mod_base = OTHER; note = 2'-O-methyladenosine-3'-phosphate
  modified_base 20: mod_base = OTHER; note = 2'-O-methyluridine-3'-phosphate
  modified_base 21: mod_base = OTHER; note = 2'-O-methylguanosine-3'- phosphorothioate
  modified_base 22: mod_base = OTHER; note = 2'-O-methyladenosine-3'- phosphorothioate
  modified_base 23: mod_base = OTHER; note = 2'-O-methyluridine-3'-phosphate
tgtagcctagacagtgaaatgat

SEQ ID NO: 3896 - RNA, 23 nt, synthetic construct
  misc_feature 1..23: note = Description of Artificial Sequence: Synthetic oligonucleotide
  source 1..23: mol_type = other RNA
  modified_base 1: mod_base = OTHER; note = 2'-O-methyladenosine-3'- phosphorothioate
  modified_base 2: mod_base = OTHER; note = 2'-fluoroguanosine-3'-phosphorothioate
  modified_base 3: mod_base = OTHER; note = 2'-O-methylcytidine-3'-phosphate
  modified_base 4: mod_base = OTHER; note = 2'-O-methyladenosine-3'-phosphate
  modified_base 5: mod_base = OTHER; note = 2'-O-methyluridine-3'-phosphate
  modified_base 6: mod_base = OTHER; note = 2'-fluorocytidine-3'-phosphate
  modified_base 7: mod_base = OTHER; note = 2'-O-methyladenosine-3'-phosphate
  modified_base 8: mod_base = OTHER; note = 2'-fluoroguanosine-3'-phosphate
  modified_base 9: mod_base = OTHER; note = 2'-fluoroguanosine-3'-phosphate
  modified_base 10: mod_base = OTHER; note = 2'-O-methyladenosine-3'-phosphate
  modified_base 11: mod_base = OTHER; note = 2'-O-methyluridine-3'-phosphate
  modified_base 12: mod_base = OTHER; note = 2'-O-methyladenosine-3'-phosphate
  modified_base 13: mod_base = OTHER; note = 2'-O-methyluridine-3'-phosphate
  modified_base 14: mod_base = OTHER; note = 2'-fluoroadenosine-3'-phosphate
  modified_base 15: mod_base = OTHER; note = 2'-O-methylguanosine-3'-phosphate
  modified_base 16: mod_base = OTHER; note = 2'-fluorocytidine-3'-phosphate
  modified_base 17: mod_base = OTHER; note = 2'-O-methyluridine-3'-phosphate
  modified_base 18: mod_base = OTHER; note = 2'-O-methylguanosine-3'-phosphate
  modified_base 19: mod_base = OTHER; note = 2'-O-methyluridine-3'-phosphate
  modified_base 20: mod_base = OTHER; note = 2'-O-methylguanosine-3'-phosphate
  modified_base 21: mod_base = OTHER; note = 2'-O-methylguanosine-3'- phosphorothioate
  modified_base 22: mod_base = OTHER; note = 2'-O-methyladenosine-3'- phosphorothioate
  modified_base 23: mod_base = OTHER; note = 2'-O-methyluridine-3'-phosphate
agcatcaggatatagctgtggat

SEQ ID NO: 3897 - RNA, 23 nt, synthetic construct
  misc_feature 1..23: note = Description of Artificial Sequence: Synthetic oligonucleotide
  source 1..23: mol_type = other RNA
  modified_base 1: mod_base = OTHER; note = 2'-O-methyluridine-3'-phosphorothioate
  modified_base 2: mod_base = OTHER; note = 2'-fluoroadenosine-3'-phosphorothioate
  modified_base 3: mod_base = OTHER; note = 2'-O-methylcytidine-3'-phosphate
  modified_base 4: mod_base = OTHER; note = 2'-O-methyluridine-3'-phosphate
  modified_base 5: mod_base = OTHER; note = 2'-O-methyladenosine-3'-phosphate
  modified_base 6: mod_base = OTHER; note = 2'-fluoroguanosine-3'-phosphate
  modified_base 7: mod_base = OTHER; note = 2'-O-methylguanosine-3'-phosphate
  modified_base 8: mod_base = OTHER; note = 2'-fluorocytidine-3'-phosphate
  modified_base 9: mod_base = OTHER; note = 2'-fluoroadenosine-3'-phosphate
  modified_base 10: mod_base = OTHER; note = 2'-O-methyluridine-3'-phosphate
  modified_base 11: mod_base = OTHER; note = 2'-O-methylguanosine-3'-phosphate
  modified_base 12: mod_base = OTHER; note = 2'-O-methyluridine-3'-phosphate
  modified_base 13: mod_base = OTHER; note = 2'-O-methyluridine-3'-phosphate
  modified_base 14: mod_base = OTHER; note = 2'-fluorocytidine-3'-phosphate
  modified_base 15: mod_base = OTHER; note = 2'-O-methyladenosine-3'-phosphate
  modified_base 16: mod_base = OTHER; note = 2'-fluoroguanosine-3'-phosphate
  modified_base 17: mod_base = OTHER; note = 2'-O-methyluridine-3'-phosphate
  modified_base 18: mod_base = OTHER; note = 2'-O-methylguanosine-3'-phosphate
  modified_base 19: mod_base = OTHER; note = 2'-O-methyladenosine-3'-phosphate
  modified_base 20: mod_base = OTHER; note = 2'-O-methyladenosine-3'-phosphate
  modified_base 21: mod_base = OTHER; note = 2'-O-methylguanosine-3'- phosphorothioate
  modified_base 22: mod_base = OTHER; note = 2'-O-methylguanosine-3'- phosphorothioate
  modified_base 23: mod_base = OTHER; note = 2'-O-methyladenosine-3'-phosphate
tactaggcatgttcagtgaagga

SEQ ID NO: 3898 - RNA, 23 nt, synthetic construct
  misc_feature 1..23: note = Description of Artificial Sequence: Synthetic oligonucleotide
  source 1..23: mol_type = other RNA
  modified_base 1: mod_base = OTHER; note = 2'-O-methyluridine-3'-phosphorothioate
  modified_base 2: mod_base = OTHER; note = 2'-fluorouridine -3'-phosphorothioate
  modified_base 3: mod_base = OTHER; note = 2'-O-methylcytidine-3'-phosphate
  modified_base 4: mod_base = OTHER; note = 2'-O-methyladenosine-3'-phosphate
  modified_base 5: mod_base = OTHER; note = 2'-O-methyluridine-3'-phosphate
  modified_base 6: mod_base = OTHER; note = 2'-fluoroadenosine-3'-phosphate
  modified_base 7: mod_base = OTHER; note = 2'-O-methyladenosine-3'-phosphate
  modified_base 8: mod_base = OTHER; note = 2'-fluoroguanosine-3'-phosphate
  modified_base 9: mod_base = OTHER; note = 2'-fluorocytidine-3'-phosphate
  modified_base 10: mod_base = OTHER; note = 2'-O-methyladenosine-3'-phosphate
  modified_base 11: mod_base = OTHER; note = 2'-O-methylcytidine-3'-phosphate
  modified_base 12: mod_base = OTHER; note = 2'-O-methyluridine-3'-phosphate
  modified_base 13: mod_base = OTHER; note = 2'-O-methylcytidine-3'-phosphate
  modified_base 14: mod_base = OTHER; note = 2'-fluorouridine-3'-phosphate
  modified_base 15: mod_base = OTHER; note = 2'-O-methylcytidine-3'-phosphate
  modified_base 16: mod_base = OTHER; note = 2'-fluoroadenosine-3'-phosphate
  modified_base 17: mod_base = OTHER; note = 2'-O-methyladenosine-3'-phosphate
  modified_base 18: mod_base = OTHER; note = 2'-O-methylcytidine-3'-phosphate
  modified_base 19: mod_base = OTHER; note = 2'-O-methylcytidine-3'-phosphate
  modified_base 20: mod_base = OTHER; note = 2'-O-methyladenosine-3'-phosphate
  modified_base 21: mod_base = OTHER; note = 2'-O-methylcytidine-3'- phosphorothioate
  modified_base 22: mod_base = OTHER; note = 2'-O-methylcytidine-3'- phosphorothioate
  modified_base 23: mod_base = OTHER; note = 2'-O-methyluridine-3'-phosphate
ttcataagcactctcaaccacct

SEQ ID NO: 3899 - RNA, 23 nt, synthetic construct
  misc_feature 1..23: note = Description of Artificial Sequence: Synthetic oligonucleotide
  source 1..23: mol_type = other RNA
  modified_base 1: mod_base = OTHER; note = 2'-O-methyluridine-3'-phosphorothioate
  modified_base 2: mod_base = OTHER; note = 2'-fluoroguanosine-3'-phosphorothioate
  modified_base 3: mod_base = OTHER; note = 2'-O-methyluridine-3'-phosphate
  modified_base 4: mod_base = OTHER; note = 2'-O-methyladenosine-3'-phosphate
  modified_base 5: mod_base = OTHER; note = 2'-O-methyladenosine-3'-phosphate
  modified_base 6: mod_base = OTHER; note = 2'-fluorouridine-3'-phosphate
  modified_base 7: mod_base = OTHER; note = 2'-O-methylguanosine-3'-phosphate
  modified_base 8: mod_base = OTHER; note = 2'-fluorouridine-3'-phosphate
  modified_base 9: mod_base = OTHER; note = 2'-fluoroadenosine-3'-phosphate
  modified_base 10: mod_base = OTHER; note = 2'-O-methylcytidine-3'-phosphate
  modified_base 11: mod_base = OTHER; note = 2'-O-methyladenosine-3'-phosphate
  modified_base 12: mod_base = OTHER; note = 2'-O-methylcytidine-3'-phosphate
  modified_base 13: mod_base = OTHER; note = 2'-O-methyluridine-3'-phosphate
  modified_base 14: mod_base = OTHER; note = 2'-fluoroadenosine-3'-phosphate
  modified_base 15: mod_base = OTHER; note = 2'-O-methylcytidine-3'-phosphate
  modified_base 16: mod_base = OTHER; note = 2'-fluorouridine-3'-phosphate
  modified_base 17: mod_base = OTHER; note = 2'-O-methylguanosine-3'-phosphate
  modified_base 18: mod_base = OTHER; note = 2'-O-methyladenosine-3'-phosphate
  modified_base 19: mod_base = OTHER; note = 2'-O-methyluridine-3'-phosphate
  modified_base 20: mod_base = OTHER; note = 2'-O-methyladenosine-3'-phosphate
  modified_base 21: mod_base = OTHER; note = 2'-O-methyluridine-3'-phosphorothioate
  modified_base 22: mod_base = OTHER; note = 2'-O-methyladenosine-3'- phosphorothioate
  modified_base 23: mod_base = OTHER; note = 2'-O-methylguanosine-3'-phosphate
tgtaatgtacactactgatatag

SEQ ID NO: 3900 - RNA, 23 nt, synthetic construct
  misc_feature 1..23: note = Description of Artificial Sequence: Synthetic oligonucleotide
  source 1..23: mol_type = other RNA
  modified_base 1: mod_base = OTHER; note = 2'-O-methyluridine-3'-phosphorothioate
  modified_base 2: mod_base = OTHER; note = 2'-fluoroadenosine-3'-phosphorothioate
  modified_base 3: mod_base = OTHER; note = 2'-O-methyladenosine-3'-phosphate
  modified_base 4: mod_base = OTHER; note = 2'-O-methylcytidine-3'-phosphate
  modified_base 5: mod_base = OTHER; note = 2'-O-methyladenosine-3'-phosphate
  modified_base 6: mod_base = OTHER; note = 2'-fluorocytidine-3'-phosphate
  modified_base 7: mod_base = OTHER; note = 2'-O-methyluridine-3'-phosphate
  modified_base 8: mod_base = OTHER; note = 2'-fluorouridine-3'-phosphate
  modified_base 9: mod_base = OTHER; note = 2'-fluoroguanosine-3'-phosphate
  modified_base 10: mod_base = OTHER; note = 2'-O-methylguanosine-3'-phosphate
  modified_base 11: mod_base = OTHER; note = 2'-O-methyladenosine-3'-phosphate
  modified_base 12: mod_base = OTHER; note = 2'-O-methyluridine-3'-phosphate
  modified_base 13: mod_base = OTHER; note = 2'-O-methyladenosine-3'-phosphate
  modified_base 14: mod_base = OTHER; note = 2'-fluoroguanosine-3'-phosphate
  modified_base 15: mod_base = OTHER; note = 2'-O-methyluridine-3'-phosphate
  modified_base 16: mod_base = OTHER; note = 2'-fluorouridine-3'-phosphate
  modified_base 17: mod_base = OTHER; note = 2'-O-methylguanosine-3'-phosphate
  modified_base 18: mod_base = OTHER; note = 2'-O-methylguanosine-3'-phosphate
  modified_base 19: mod_base = OTHER; note = 2'-O-methyluridine-3'-phosphate
  modified_base 20: mod_base = OTHER; note = 2'-O-methyluridine-3'-phosphate
  modified_base 21: mod_base = OTHER; note = 2'-O-methylguanosine-3'- phosphorothioate
  modified_base 22: mod_base = OTHER; note = 2'-O-methylcytidine-3'- phosphorothioate
  modified_base 23: mod_base = OTHER; note = 2'-O-methyladenosine-3'-phosphate
taacacttggatagttggttgca

SEQ ID NO: 3901 - RNA, 23 nt, synthetic construct
  misc_feature 1..23: note = Description of Artificial Sequence: Synthetic oligonucleotide
  source 1..23: mol_type = other RNA
  modified_base 1: mod_base = OTHER; note = 2'-O-methyluridine-3'-phosphorothioate
  modified_base 2: mod_base = OTHER; note = 2'-fluoroadenosine-3'-phosphorothioate
  modified_base 3: mod_base = OTHER; note = 2'-O-methyluridine-3'-phosphate
  modified_base 4: mod_base = OTHER; note = 2'-O-methyladenosine-3'-phosphate
  modified_base 5: mod_base = OTHER; note = 2'-O-methylcytidine-3'-phosphate
  modified_base 6: mod_base = OTHER; note = 2'-fluorouridine-3'-phosphate
  modified_base 7: mod_base = OTHER; note = 2'-O-methylcytidine-3'-phosphate
  modified_base 8: mod_base = OTHER; note = 2'-fluorouridine-3'-phosphate
  modified_base 9: mod_base = OTHER; note = 2'-fluorocytidine-3'-phosphate
  modified_base 10: mod_base = OTHER; note = 2'-O-methyluridine-3'-phosphate
  modified_base 11: mod_base = OTHER; note = 2'-O-methylguanosine-3'-phosphate
  modified_base 12: mod_base = OTHER; note = 2'-O-methylcytidine-3'-phosphate
  modified_base 13: mod_base = OTHER; note = 2'-O-methylcytidine-3'-phosphate
  modified_base 14: mod_base = OTHER; note = 2'-fluoroadenosine-3'-phosphate
  modified_base 15: mod_base = OTHER; note = 2'-O-methyladenosine-3'-phosphate
  modified_base 16: mod_base = OTHER; note = 2'-fluoroadenosine-3'-phosphate
  modified_base 17: mod_base = OTHER; note = 2'-O-methyluridine-3'-phosphate
  modified_base 18: mod_base = OTHER; note = 2'-O-methylcytidine-3'-phosphate
  modified_base 19: mod_base = OTHER; note = 2'-O-methyluridine-3'-phosphate
  modified_base 20: mod_base = OTHER; note = 2'-O-methylguanosine-3'-phosphate
  modified_base 21: mod_base = OTHER; note = 2'-O-methylcytidine-3'- phosphorothioate
  modified_base 22: mod_base = OTHER; note = 2'-O-methyluridine-3'-phosphorothioate
  modified_base 23: mod_base = OTHER; note = 2'-O-methyladenosine-3'-phosphate
tatactctctgccaaatctgcta

SEQ ID NO: 3902 - RNA, 23 nt, synthetic construct
  misc_feature 1..23: note = Description of Artificial Sequence: Synthetic oligonucleotide
  source 1..23: mol_type = other RNA
  modified_base 1: mod_base = OTHER; note = 2'-O-methyluridine-3'-phosphorothioate
  modified_base 2: mod_base = OTHER; note = 2'-fluoroadenosine-3'-phosphorothioate
  modified_base 3: mod_base = OTHER; note = 2'-O-methylguanosine-3'-phosphate
  modified_base 4: mod_base = OTHER; note = 2'-O-methylguanosine-3'-phosphate
  modified_base 5: mod_base = OTHER; note = 2'-O-methylcytidine-3'-phosphate
  modified_base 6: mod_base = OTHER; note = 2'-fluoroadenosine-3'-phosphate
  modified_base 7: mod_base = OTHER; note = 2'-O-methyluridine-3'-phosphate
  modified_base 8: mod_base = OTHER; note = 2'-fluoroguanosine-3'-phosphate
  modified_base 9: mod_base = OTHER; note = 2'-fluorouridine-3'-phosphate
  modified_base 10: mod_base = OTHER; note = 2'-O-methyluridine-3'-phosphate
  modified_base 11: mod_base = OTHER; note = 2'-O-methylcytidine-3'-phosphate
  modified_base 12: mod_base = OTHER; note = 2'-O-methyladenosine-3'-phosphate
  modified_base 13: mod_base = OTHER; note = 2'-O-methylguanosine-3'-phosphate
  modified_base 14: mod_base = OTHER; note = 2'-fluorouridine-3'-phosphate
  modified_base 15: mod_base = OTHER; note = 2'-O-methylguanosine-3'-phosphate
  modified_base 16: mod_base = OTHER; note = 2'-fluoroadenosine-3'-phosphate
  modified_base 17: mod_base = OTHER; note = 2'-O-methyladenosine-3'-phosphate
  modified_base 18: mod_base = OTHER; note = 2'-O-methylguanosine-3'-phosphate
  modified_base 19: mod_base = OTHER; note = 2'-O-methylguanosine-3'-phosphate
  modified_base 20: mod_base = OTHER; note = 2'-O-methyladenosine-3'-phosphate
  modified_base 21: mod_base = OTHER; note = 2'-O-methylguanosine-3'- phosphorothioate
  modified_base 22: mod_base = OTHER; note = 2'-O-methylcytidine-3'- phosphorothioate
  modified_base 23: mod_base = OTHER; note = 2'-O-methylcytidine-3'-phosphate
taggcatgttcagtgaaggagcc

SEQ ID NO: 3903 - RNA, 23 nt, synthetic construct
  misc_feature 1..23: note = Description of Artificial Sequence: Synthetic oligonucleotide
  source 1..23: mol_type = other RNA
  modified_base 1: mod_base = OTHER; note = 2'-O-methyladenosine-3'- phosphorothioate
  modified_base 2: mod_base = OTHER; note = 2'-fluoroadenosine-3'-phosphorothioate
  modified_base 3: mod_base = OTHER; note = 2'-O-methyladenosine-3'-phosphate
  modified_base 4: mod_base = OTHER; note = 2'-O-methyladenosine-3'-phosphate
  modified_base 5: mod_base = OTHER; note = 2'-O-methyladenosine-3'-phosphate
  modified_base 6: mod_base = OTHER; note = 2'-fluorouridine-3'-phosphate
  modified_base 7: mod_base = OTHER; note = 2'-O-methylguanosine-3'-phosphate
  modified_base 8: mod_base = OTHER; note = 2'-fluorouridine-3'-phosphate
  modified_base 9: mod_base = OTHER; note = 2'-fluorouridine-3'-phosphate
  modified_base 10: mod_base = OTHER; note = 2'-O-methylguanosine-3'-phosphate
  modified_base 11: mod_base = OTHER; note = 2'-O-methylguanosine-3'-phosphate
  modified_base 12: mod_base = OTHER; note = 2'-O-methyladenosine-3'-phosphate
  modified_base 13: mod_base = OTHER; note = 2'-O-methylcytidine-3'-phosphate
  modified_base 14: mod_base = OTHER; note = 2'-fluorouridine-3'-phosphate
  modified_base 15: mod_base = OTHER; note = 2'-O-methyladenosine-3'-phosphate
  modified_base 16: mod_base = OTHER; note = 2'-fluoroguanosine-3'-phosphate
  modified_base 17: mod_base = OTHER; note = 2'-O-methylguanosine-3'-phosphate
  modified_base 18: mod_base = OTHER; note = 2'-O-methylcytidine-3'-phosphate
  modified_base 19: mod_base = OTHER; note = 2'-O-methyladenosine-3'-phosphate
  modified_base 20: mod_base = OTHER; note = 2'-O-methyluridine-3'-phosphate
  modified_base 21: mod_base = OTHER; note = 2'-O-methylguanosine-3'- phosphorothioate
  modified_base 22: mod_base = OTHER; note = 2'-O-methyluridine-3'-phosphorothioate
  modified_base 23: mod_base = OTHER; note = 2'-O-methyluridine-3'-phosphate
aaaaatgttggactaggcatgtt

SEQ ID NO: 3904 - RNA, 23 nt, synthetic construct
  misc_feature 1..23: note = Description of Artificial Sequence: Synthetic oligonucleotide
  source 1..23: mol_type = other RNA
  modified_base 1: mod_base = OTHER; note = 2'-O-methyluridine-3'-phosphorothioate
  modified_base 2: mod_base = OTHER; note = 2'-fluorouridine -3'-phosphorothioate
  modified_base 3: mod_base = OTHER; note = 2'-O-methylcytidine-3'-phosphate
  modified_base 4: mod_base = OTHER; note = 2'-O-methyladenosine-3'-phosphate
  modified_base 5: mod_base = OTHER; note = 2'-O-methyluridine-3'-phosphate
  modified_base 6: mod_base = OTHER; note = 2'-fluorouridine-3'-phosphate
  modified_base 7: mod_base = OTHER; note = 2'-O-methyladenosine-3'-phosphate
  modified_base 8: mod_base = OTHER; note = 2'-fluoroadenosine-3'-phosphate
  modified_base 9: mod_base = OTHER; note = 2'-fluoroguanosine-3'-phosphate
  modified_base 10: mod_base = OTHER; note = 2'-O-methyladenosine-3'-phosphate
  modified_base 11: mod_base = OTHER; note = 2'-O-methyluridine-3'-phosphate
  modified_base 12: mod_base = OTHER; note = 2'-O-methyladenosine-3'-phosphate
  modified_base 13: mod_base = OTHER; note = 2'-O-methylcytidine-3'-phosphate
  modified_base 14: mod_base = OTHER; note = 2'-fluorouridine-3'-phosphate
  modified_base 15: mod_base = OTHER; note = 2'-O-methylguanosine-3'-phosphate
  modified_base 16: mod_base = OTHER; note = 2'-fluoroadenosine-3'-phosphate
  modified_base 17: mod_base = OTHER; note = 2'-O-methyluridine-3'-phosphate
  modified_base 18: mod_base = OTHER; note = 2'-O-methylguanosine-3'-phosphate
  modified_base 19: mod_base = OTHER; note = 2'-O-methylguanosine-3'-phosphate
  modified_base 20: mod_base = OTHER; note = 2'-O-methylcytidine-3'-phosphate
  modified_base 21: mod_base = OTHER; note = 2'-O-methyladenosine-3'- phosphorothioate
  modified_base 22: mod_base = OTHER; note = 2'-O-methylcytidine-3'- phosphorothioate
  modified_base 23: mod_base = OTHER; note = 2'-O-methyladenosine-3'-phosphate
ttcattaagatactgatggcaca

SEQ ID NO: 3905 - RNA, 23 nt, synthetic construct
  misc_feature 1..23: note = Description of Artificial Sequence: Synthetic oligonucleotide
  source 1..23: mol_type = other RNA
  modified_base 1: mod_base = OTHER; note = 2'-O-methyluridine-3'-phosphorothioate
  modified_base 2: mod_base = OTHER; note = 2'-fluorouridine -3'-phosphorothioate
  modified_base 3: mod_base = OTHER; note = 2'-O-methyluridine-3'-phosphate
  modified_base 4: mod_base = OTHER; note = 2'-O-methylcytidine-3'-phosphate
  modified_base 5: mod_base = OTHER; note = 2'-O-methyladenosine-3'-phosphate
  modified_base 6: mod_base = OTHER; note = 2'-fluorouridine-3'-phosphate
  modified_base 7: mod_base = OTHER; note = 2'-O-methyluridine-3'-phosphate
  modified_base 8: mod_base = OTHER; note = 2'-fluoroadenosine-3'-phosphate
  modified_base 9: mod_base = OTHER; note = 2'-fluoroadenosine-3'-phosphate
  modified_base 10: mod_base = OTHER; note = 2'-O-methylguanosine-3'-phosphate
  modified_base 11: mod_base = OTHER; note = 2'-O-methyladenosine-3'-phosphate
  modified_base 12: mod_base = OTHER; note = 2'-O-methyluridine-3'-phosphate
  modified_base 13: mod_base = OTHER; note = 2'-O-methyladenosine-3'-phosphate
  modified_base 14: mod_base = OTHER; note = 2'-fluorocytidine-3'-phosphate
  modified_base 15: mod_base = OTHER; note = 2'-O-methyluridine-3'-phosphate
  modified_base 16: mod_base = OTHER; note = 2'-fluoroguanosine-3'-phosphate
  modified_base 17: mod_base = OTHER; note = 2'-O-methyladenosine-3'-phosphate
  modified_base 18: mod_base = OTHER; note = 2'-O-methyluridine-3'-phosphate
  modified_base 19: mod_base = OTHER; note = 2'-O-methylguanosine-3'-phosphate
  modified_base 20: mod_base = OTHER; note = 2'-O-methylguanosine-3'-phosphate
  modified_base 21: mod_base = OTHER; note = 2'-O-methylcytidine-3'- phosphorothioate
  modified_base 22: mod_base = OTHER; note = 2'-O-methyladenosine-3'- phosphorothioate
  modified_base 23: mod_base = OTHER; note = 2'-O-methylcytidine-3'-phosphate
tttcattaagatactgatggcac

SEQ ID NO: 3906 - RNA, 23 nt, synthetic construct
  misc_feature 1..23: note = Description of Artificial Sequence: Synthetic oligonucleotide
  source 1..23: mol_type = other RNA
  modified_base 1: mod_base = OTHER; note = 2'-O-methyladenosine-3'- phosphorothioate
  modified_base 2: mod_base = OTHER; note = 2'-fluoroguanosine-3'-phosphorothioate
  modified_base 3: mod_base = OTHER; note = 2'-O-methyladenosine-3'-phosphate
  modified_base 4: mod_base = OTHER; note = 2'-O-methylcytidine-3'-phosphate
  modified_base 5: mod_base = OTHER; note = 2'-O-methyladenosine-3'-phosphate
  modified_base 6: mod_base = OTHER; note = 2'-fluoroadenosine-3'-phosphate
  modified_base 7: mod_base = OTHER; note = 2'-O-methyluridine-3'-phosphate
  modified_base 8: mod_base = OTHER; note = 2'-fluorocytidine-3'-phosphate
  modified_base 9: mod_base = OTHER; note = 2'-fluorouridine-3'-phosphate
  modified_base 10: mod_base = OTHER; note = 2'-O-methyluridine-3'-phosphate
  modified_base 11: mod_base = OTHER; note = 2'-O-methyluridine-3'-phosphate
  modified_base 12: mod_base = OTHER; note = 2'-O-methylguanosine-3'-phosphate
  modified_base 13: mod_base = OTHER; note = 2'-O-methylguanosine-3'-phosphate
  modified_base 14: mod_base = OTHER; note = 2'-fluorouridine-3'-phosphate
  modified_base 15: mod_base = OTHER; note = 2'-O-methylguanosine-3'-phosphate
  modified_base 16: mod_base = OTHER; note = 2'-fluorouridine-3'-phosphate
  modified_base 17: mod_base = OTHER; note = 2'-O-methyluridine-3'-phosphate
  modified_base 18: mod_base = OTHER; note = 2'-O-methylcytidine-3'-phosphate
  modified_base 19: mod_base = OTHER; note = 2'-O-methyluridine-3'-phosphate
  modified_base 20: mod_base = OTHER; note = 2'-O-methyladenosine-3'-phosphate
  modified_base 21: mod_base = OTHER; note = 2'-O-methyladenosine-3'- phosphorothioate
  modified_base 22: mod_base = OTHER; note = 2'-O-methylguanosine-3'- phosphorothioate
  modified_base 23: mod_base = OTHER; note = 2'-O-methylguanosine-3'-phosphate
agacaatctttggtgttctaagg

SEQ ID NO: 3907 - RNA, 23 nt, synthetic construct
  misc_feature 1..23: note = Description of Artificial Sequence: Synthetic oligonucleotide
  source 1..23: mol_type = other RNA
  modified_base 1: mod_base = OTHER; note = 2'-O-methyluridine-3'-phosphorothioate
  modified_base 2: mod_base = OTHER; note = 2'-fluoroadenosine-3'-phosphorothioate
  modified_base 3: mod_base = OTHER; note = 2'-O-methylguanosine-3'-phosphate
  modified_base 4: mod_base = OTHER; note = 2'-O-methylcytidine-3'-phosphate
  modified_base 5: mod_base = OTHER; note = 2'-O-methylcytidine-3'-phosphate
  modified_base 6: mod_base = OTHER; note = 2'-fluorouridine-3'-phosphate
  modified_base 7: mod_base = OTHER; note = 2'-O-methyladenosine-3'-phosphate
  modified_base 8: mod_base = OTHER; note = 2'-fluoroguanosine-3'-phosphate
  modified_base 9: mod_base = OTHER; note = 2'-fluoroadenosine-3'-phosphate
  modified_base 10: mod_base = OTHER; note = 2'-O-methylcytidine-3'-phosphate
  modified_base 11: mod_base = OTHER; note = 2'-O-methyladenosine-3'-phosphate
  modified_base 12: mod_base = OTHER; note = 2'-O-methylguanosine-3'-phosphate
  modified_base 13: mod_base = OTHER; note = 2'-O-methyluridine-3'-phosphate
  modified_base 14: mod_base = OTHER; note = 2'-fluoroguanosine-3'-phosphate
  modified_base 15: mod_base = OTHER; note = 2'-O-methyladenosine-3'-phosphate
  modified_base 16: mod_base = OTHER; note = 2'-fluoroadenosine-3'-phosphate
  modified_base 17: mod_base = OTHER; note = 2'-O-methyladenosine-3'-phosphate
  modified_base 18: mod_base = OTHER; note = 2'-O-methyluridine-3'-phosphate
  modified_base 19: mod_base = OTHER; note = 2'-O-methylguanosine-3'-phosphate
  modified_base 20: mod_base = OTHER; note = 2'-O-methyladenosine-3'-phosphate
  modified_base 21: mod_base = OTHER; note = 2'-O-methyluridine-3'-phosphorothioate
  modified_base 22: mod_base = OTHER; note = 2'-O-methyladenosine-3'- phosphorothioate
  modified_base 23: mod_base = OTHER; note = 2'-O-methyluridine-3'-phosphate
tagcctagacagtgaaatgatat

SEQ ID NO: 3908 - RNA, 23 nt, synthetic construct
  misc_feature 1..23: note = Description of Artificial Sequence: Synthetic oligonucleotide
  source 1..23: mol_type = other RNA
  modified_base 1: mod_base = OTHER; note = 2'-O-methyluridine-3'-phosphorothioate
  modified_base 2: mod_base = OTHER; note = 2'-fluorouridine -3'-phosphorothioate
  modified_base 3: mod_base = OTHER; note = 2'-O-methylguanosine-3'-phosphate
  modified_base 4: mod_base = OTHER; note = 2'-O-methyluridine-3'-phosphate
  modified_base 5: mod_base = OTHER; note = 2'-O-methyluridine-3'-phosphate
  modified_base 6: mod_base = OTHER; note = 2'-fluoroguanosine-3'-phosphate
  modified_base 7: mod_base = OTHER; note = 2'-O-methyluridine-3'-phosphate
  modified_base 8: mod_base = OTHER; note = 2'-fluoroadenosine-3'-phosphate
  modified_base 9: mod_base = OTHER; note = 2'-fluoroguanosine-3'-phosphate
  modified_base 10: mod_base = OTHER; note = 2'-O-methylcytidine-3'-phosphate
  modified_base 11: mod_base = OTHER; note = 2'-O-methylcytidine-3'-phosphate
  modified_base 12: mod_base = OTHER; note = 2'-O-methyluridine-3'-phosphate
  modified_base 13: mod_base = OTHER; note = 2'-O-methyladenosine-3'-phosphate
  modified_base 14: mod_base = OTHER; note = 2'-fluoroguanosine-3'-phosphate
  modified_base 15: mod_base = OTHER; note = 2'-O-methyladenosine-3'-phosphate
  modified_base 16: mod_base = OTHER; note = 2'-fluorocytidine-3'-phosphate
  modified_base 17: mod_base = OTHER; note = 2'-O-methyladenosine-3'-phosphate
  modified_base 18: mod_base = OTHER; note = 2'-O-methylguanosine-3'-phosphate
  modified_base 19: mod_base = OTHER; note = 2'-O-methyluridine-3'-phosphate
  modified_base 20: mod_base = OTHER; note = 2'-O-methylguanosine-3'-phosphate
  modified_base 21: mod_base = OTHER; note = 2'-O-methyladenosine-3'- phosphorothioate
  modified_base 22: mod_base = OTHER; note = 2'-O-methyladenosine-3'- phosphorothioate
  modified_base 23: mod_base = OTHER; note = 2'-O-methyladenosine-3'-phosphate
ttgttgtagcctagacagtgaaa

SEQ ID NO: 3909 - RNA, 23 nt, synthetic construct
  misc_feature 1..23: note = Description of Artificial Sequence: Synthetic oligonucleotide
  source 1..23: mol_type = other RNA
  modified_base 1: mod_base = OTHER; note = 2'-O-methyluridine-3'-phosphorothioate
  modified_base 2: mod_base = OTHER; note = 2'-fluoroguanosine-3'-phosphorothioate
  modified_base 3: mod_base = OTHER; note = 2'-O-methyluridine-3'-phosphate
  modified_base 4: mod_base = OTHER; note = 2'-O-methyladenosine-3'-phosphate
  modified_base 5: mod_base = OTHER; note = 2'-O-methyluridine-3'-phosphate
  modified_base 6: mod_base = OTHER; note = 2'-fluoroadenosine-3'-phosphate
  modified_base 7: mod_base = OTHER; note = 2'-O-methyladenosine-3'-phosphate
  modified_base 8: mod_base = OTHER; note = 2'-fluorocytidine-3'-phosphate
  modified_base 9: mod_base = OTHER; note = 2'-fluoroadenosine-3'-phosphate
  modified_base 10: mod_base = OTHER; note = 2'-O-methylcytidine-3'-phosphate
  modified_base 11: mod_base = OTHER; note = 2'-O-methyluridine-3'-phosphate
  modified_base 12: mod_base = OTHER; note = 2'-O-methyluridine-3'-phosphate
  modified_base 13: mod_base = OTHER; note = 2'-O-methylguanosine-3'-phosphate
  modified_base 14: mod_base = OTHER; note = 2'-fluoroguanosine-3'-phosphate
  modified_base 15: mod_base = OTHER; note = 2'-O-methyladenosine-3'-phosphate
  modified_base 16: mod_base = OTHER; note = 2'-fluorouridine-3'-phosphate
  modified_base 17: mod_base = OTHER; note = 2'-O-methyladenosine-3'-phosphate
  modified_base 18: mod_base = OTHER; note = 2'-O-methylguanosine-3'-phosphate
  modified_base 19: mod_base = OTHER; note = 2'-O-methyluridine-3'-phosphate
  modified_base 20: mod_base = OTHER; note = 2'-O-methyluridine-3'-phosphate
  modified_base 21: mod_base = OTHER; note = 2'-O-methylguanosine-3'- phosphorothioate
  modified_base 22: mod_base = OTHER; note = 2'-O-methylguanosine-3'- phosphorothioate
  modified_base 23: mod_base = OTHER; note = 2'-O-methyluridine-3'-phosphate
tgtataacacttggatagttggt

SEQ ID NO: 3910 - RNA, 23 nt, synthetic construct
  misc_feature 1..23: note = Description of Artificial Sequence: Synthetic oligonucleotide
  source 1..23: mol_type = other RNA
  modified_base 1: mod_base = OTHER; note = 2'-O-methyluridine-3'-phosphorothioate
  modified_base 2: mod_base = OTHER; note = 2'-fluorocytidine-3'-phosphorothioate
  modified_base 3: mod_base = OTHER; note = 2'-O-methyladenosine-3'-phosphate
  modified_base 4: mod_base = OTHER; note = 2'-O-methyluridine-3'-phosphate
  modified_base 5: mod_base = OTHER; note = 2'-O-methyladenosine-3'-phosphate
  modified_base 6: mod_base = OTHER; note = 2'-fluorouridine-3'-phosphate
  modified_base 7: mod_base = OTHER; note = 2'-O-methyluridine-3'-phosphate
  modified_base 8: mod_base = OTHER; note = 2'-fluoroguanosine-3'-phosphate
  modified_base 9: mod_base = OTHER; note = 2'-fluoroguanosine-3'-phosphate
  modified_base 10: mod_base = OTHER; note = 2'-O-methyladenosine-3'-phosphate
  modified_base 11: mod_base = OTHER; note = 2'-O-methylcytidine-3'-phosphate
  modified_base 12: mod_base = OTHER; note = 2'-O-methyluridine-3'-phosphate
  modified_base 13: mod_base = OTHER; note = 2'-O-methyluridine-3'-phosphate
  modified_base 14: mod_base = OTHER; note = 2'-fluoroguanosine-3'-phosphate
  modified_base 15: mod_base = OTHER; note = 2'-O-methylguanosine-3'-phosphate
  modified_base 16: mod_base = OTHER; note = 2'-fluoroadenosine-3'-phosphate
  modified_base 17: mod_base = OTHER; note = 2'-O-methyladenosine-3'-phosphate
  modified_base 18: mod_base = OTHER; note = 2'-O-methylcytidine-3'-phosphate
  modified_base 19: mod_base = OTHER; note = 2'-O-methylcytidine-3'-phosphate
  modified_base 20: mod_base = OTHER; note = 2'-O-methyladenosine-3'-phosphate
  modified_base 21: mod_base = OTHER; note = 2'-O-methyladenosine-3'- phosphorothioate
  modified_base 22: mod_base = OTHER; note = 2'-O-methyladenosine-3'- phosphorothioate
  modified_base 23: mod_base = OTHER; note = 2'-O-methyladenosine-3'-phosphate
tcatattggacttggaaccaaaa

SEQ ID NO: 3911 - RNA, 23 nt, synthetic construct
  misc_feature 1..23: note = Description of Artificial Sequence: Synthetic oligonucleotide
  source 1..23: mol_type = other RNA
  modified_base 1: mod_base = OTHER; note = 2'-O-methyladenosine-3'- phosphorothioate
  modified_base 2: mod_base = OTHER; note = 2'-fluoroguanosine-3'-phosphorothioate
  modified_base 3: mod_base = OTHER; note = 2'-O-methyluridine-3'-phosphate
  modified_base 4: mod_base = OTHER; note = 2'-O-methyluridine-3'-phosphate
  modified_base 5: mod_base = OTHER; note = 2'-O-methyluridine-3'-phosphate
  modified_base 6: mod_base = OTHER; note = 2'-fluoroguanosine-3'-phosphate
  modified_base 7: mod_base = OTHER; note = 2'-O-methyladenosine-3'-phosphate
  modified_base 8: mod_base = OTHER; note = 2'-fluorouridine-3'-phosphate
  modified_base 9: mod_base = OTHER; note = 2'-fluorocytidine-3'-phosphate
  modified_base 10: mod_base = OTHER; note = 2'-O-methyladenosine-3'-phosphate
  modified_base 11: mod_base = OTHER; note = 2'-O-methylcytidine-3'-phosphate
  modified_base 12: mod_base = OTHER; note = 2'-O-methylcytidine-3'-phosphate
  modified_base 13: mod_base = OTHER; note = 2'-O-methyluridine-3'-phosphate
  modified_base 14: mod_base = OTHER; note = 2'-fluorocytidine-3'-phosphate
  modified_base 15: mod_base = OTHER; note = 2'-O-methyladenosine-3'-phosphate
  modified_base 16: mod_base = OTHER; note = 2'-fluorouridine-3'-phosphate
  modified_base 17: mod_base = OTHER; note = 2'-O-methyladenosine-3'-phosphate
  modified_base 18: mod_base = OTHER; note = 2'-O-methyladenosine-3'-phosphate
  modified_base 19: mod_base = OTHER; note = 2'-O-methylguanosine-3'-phosphate
  modified_base 20: mod_base = OTHER; note = 2'-O-methylcytidine-3'-phosphate
  modified_base 21: mod_base = OTHER; note = 2'-O-methyladenosine-3'- phosphorothioate
  modified_base 22: mod_base = OTHER; note = 2'-O-methylcytidine-3'- phosphorothioate
  modified_base 23: mod_base = OTHER; note = 2'-O-methyluridine-3'-phosphate
agtttgatcacctcataagcact

SEQ ID NO: 3912 - RNA, 23 nt, synthetic construct
  misc_feature 1..23: note = Description of Artificial Sequence: Synthetic oligonucleotide
  source 1..23: mol_type = other RNA
  modified_base 1: mod_base = OTHER; note = 2'-O-methyluridine-3'-phosphorothioate
  modified_base 2: mod_base = OTHER; note = 2'-fluorocytidine-3'-phosphorothioate
  modified_base 3: mod_base = OTHER; note = 2'-O-methyladenosine-3'-phosphate
  modified_base 4: mod_base = OTHER; note = 2'-O-methylcytidine-3'-phosphate
  modified_base 5: mod_base = OTHER; note = 2'-O-methylcytidine-3'-phosphate
  modified_base 6: mod_base = OTHER; note = 2'-fluorouridine-3'-phosphate
  modified_base 7: mod_base = OTHER; note = 2'-O-methyluridine-3'-phosphate
  modified_base 8: mod_base = OTHER; note = 2'-fluorocytidine-3'-phosphate
  modified_base 9: mod_base = OTHER; note = 2'-fluoroadenosine-3'-phosphate
  modified_base 10: mod_base = OTHER; note = 2'-O-methylcytidine-3'-phosphate
  modified_base 11: mod_base = OTHER; note = 2'-O-methyladenosine-3'-phosphate
  modified_base 12: mod_base = OTHER; note = 2'-O-methyladenosine-3'-phosphate
  modified_base 13: mod_base = OTHER; note = 2'-O-methylguanosine-3'-phosphate
  modified_base 14: mod_base = OTHER; note = 2'-fluoroguanosine-3'-phosphate
  modified_base 15: mod_base = OTHER; note = 2'-O-methyluridine-3'-phosphate
  modified_base 16: mod_base = OTHER; note = 2'-fluorocytidine-3'-phosphate
  modified_base 17: mod_base = OTHER; note = 2'-O-methyluridine-3'-phosphate
  modified_base 18: mod_base = OTHER; note = 2'-O-methylguanosine-3'-phosphate
  modified_base 19: mod_base = OTHER; note = 2'-O-methyladenosine-3'-phosphate
  modified_base 20: mod_base = OTHER; note = 2'-O-methylguanosine-3'-phosphate
  modified_base 21: mod_base = OTHER; note = 2'-O-methyladenosine-3'- phosphorothioate
  modified_base 22: mod_base = OTHER; note = 2'-O-methyluridine-3'-phosphorothioate
  modified_base 23: mod_base = OTHER; note = 2'-O-methyluridine-3'-phosphate
tcaccttcacaaggtctgagatt

SEQ ID NO: 3913 - RNA, 23 nt, synthetic construct
  misc_feature 1..23: note = Description of Artificial Sequence: Synthetic oligonucleotide
  source 1..23: mol_type = other RNA
  modified_base 1: mod_base = OTHER; note = 2'-O-methyladenosine-3'- phosphorothioate
  modified_base 2: mod_base = OTHER; note = 2'-fluoroguanosine-3'-phosphorothioate
  modified_base 3: mod_base = OTHER; note = 2'-O-methylguanosine-3'-phosphate
  modified_base 4: mod_base = OTHER; note = 2'-O-methyladenosine-3'-phosphate
  modified_base 5: mod_base = OTHER; note = 2'-O-methyluridine-3'-phosphate
  modified_base 6: mod_base = OTHER; note = 2'-fluoroadenosine-3'-phosphate
  modified_base 7: mod_base = OTHER; note = 2'-O-methyluridine-3'-phosphate
  modified_base 8: mod_base = OTHER; note = 2'-fluoroadenosine-3'-phosphate
  modified_base 9: mod_base = OTHER; note = 2'-fluoroguanosine-3'-phosphate
  modified_base 10: mod_base = OTHER; note = 2'-O-methylcytidine-3'-phosphate
  modified_base 11: mod_base = OTHER; note = 2'-O-methyluridine-3'-phosphate
  modified_base 12: mod_base = OTHER; note = 2'-O-methylguanosine-3'-phosphate
  modified_base 13: mod_base = OTHER; note = 2'-O-methyluridine-3'-phosphate
  modified_base 14: mod_base = OTHER; note = 2'-fluoroguanosine-3'-phosphate
  modified_base 15: mod_base = OTHER; note = 2'-O-methylguanosine-3'-phosphate
  modified_base 16: mod_base = OTHER; note = 2'-fluoroadenosine-3'-phosphate
  modified_base 17: mod_base = OTHER; note = 2'-O-methyluridine-3'-phosphate
  modified_base 18: mod_base = OTHER; note = 2'-O-methyluridine-3'-phosphate
  modified_base 19: mod_base = OTHER; note = 2'-O-methyluridine-3'-phosphate
  modified_base 20: mod_base = OTHER; note = 2'-O-methyluridine-3'-phosphate
  modified_base 21: mod_base = OTHER; note = 2'-O-methyladenosine-3'- phosphorothioate
  modified_base 22: mod_base = OTHER; note = 2'-O-methylcytidine-3'- phosphorothioate
  modified_base 23: mod_base = OTHER; note = 2'-O-methyladenosine-3'-phosphate
aggatatagctgtggattttaca

SEQ ID NO: 3914 - RNA, 23 nt, synthetic construct
  misc_feature 1..23: note = Description of Artificial Sequence: Synthetic oligonucleotide
  source 1..23: mol_type = other RNA
  modified_base 1: mod_base = OTHER; note = 2'-O-methyladenosine-3'- phosphorothioate
  modified_base 2: mod_base = OTHER; note = 2'-fluorocytidine-3'-phosphorothioate
  modified_base 3: mod_base = OTHER; note = 2'-O-methyluridine-3'-phosphate
  modified_base 4: mod_base = OTHER; note = 2'-O-methyladenosine-3'-phosphate
  modified_base 5: mod_base = OTHER; note = 2'-O-methylguanosine-3'-phosphate
  modified_base 6: mod_base = OTHER; note = 2'-fluoroguanosine-3'-phosphate
  modified_base 7: mod_base = OTHER; note = 2'-O-methylcytidine-3'-phosphate
  modified_base 8: mod_base = OTHER; note = 2'-fluoroadenosine-3'-phosphate
  modified_base 9: mod_base = OTHER; note = 2'-fluorouridine-3'-phosphate
  modified_base 10: mod_base = OTHER; note = 2'-O-methylguanosine-3'-phosphate
  modified_base 11: mod_base = OTHER; note = 2'-O-methyluridine-3'-phosphate
  modified_base 12: mod_base = OTHER; note = 2'-O-methyluridine-3'-phosphate
  modified_base 13: mod_base = OTHER; note = 2'-O-methylcytidine-3'-phosphate
  modified_base 14: mod_base = OTHER; note = 2'-fluoroadenosine-3'-phosphate
  modified_base 15: mod_base = OTHER; note = 2'-O-methylguanosine-3'-phosphate
  modified_base 16: mod_base = OTHER; note = 2'-fluorouridine-3'-phosphate
  modified_base 17: mod_base = OTHER; note = 2'-O-methylguanosine-3'-phosphate
  modified_base 18: mod_base = OTHER; note = 2'-O-methyladenosine-3'-phosphate
  modified_base 19: mod_base = OTHER; note = 2'-O-methyladenosine-3'-phosphate
  modified_base 20: mod_base = OTHER; note = 2'-O-methylguanosine-3'-phosphate
  modified_base 21: mod_base = OTHER; note = 2'-O-methylguanosine-3'- phosphorothioate
  modified_base 22: mod_base = OTHER; note = 2'-O-methyladenosine-3'- phosphorothioate
  modified_base 23: mod_base = OTHER; note = 2'-O-methylguanosine-3'-phosphate
actaggcatgttcagtgaaggag

SEQ ID NO: 3915 - RNA, 23 nt, synthetic construct
  misc_feature 1..23: note = Description of Artificial Sequence: Synthetic oligonucleotide
  source 1..23: mol_type = other RNA
  modified_base 1: mod_base = OTHER; note = 2'-O-methyluridine-3'-phosphorothioate
  modified_base 2: mod_base = OTHER; note = 2'-fluoroguanosine-3'-phosphorothioate
  modified_base 3: mod_base = OTHER; note = 2'-O-methylguanosine-3'-phosphate
  modified_base 4: mod_base = OTHER; note = 2'-O-methyladenosine-3'-phosphate
  modified_base 5: mod_base = OTHER; note = 2'-O-methyluridine-3'-phosphate
  modified_base 6: mod_base = OTHER; note = 2'-fluorouridine-3'-phosphate
  modified_base 7: mod_base = OTHER; note = 2'-O-methyluridine-3'-phosphate
  modified_base 8: mod_base = OTHER; note = 2'-fluoroadenosine-3'-phosphate
  modified_base 9: mod_base = OTHER; note = 2'-fluorouridine-3'-phosphate
  modified_base 10: mod_base = OTHER; note = 2'-O-methyladenosine-3'-phosphate
  modified_base 11: mod_base = OTHER; note = 2'-O-methylcytidine-3'-phosphate
  modified_base 12: mod_base = OTHER; note = 2'-O-methyladenosine-3'-phosphate
  modified_base 13: mod_base = OTHER; note = 2'-O-methylcytidine-3'-phosphate
  modified_base 14: mod_base = OTHER; note = 2'-fluorouridine-3'-phosphate
  modified_base 15: mod_base = OTHER; note = 2'-O-methylguanosine-3'-phosphate
  modified_base 16: mod_base = OTHER; note = 2'-fluoroguanosine-3'-phosphate
  modified_base 17: mod_base = OTHER; note = 2'-O-methyladenosine-3'-phosphate
  modified_base 18: mod_base = OTHER; note = 2'-O-methyluridine-3'-phosphate
  modified_base 19: mod_base = OTHER; note = 2'-O-methylcytidine-3'-phosphate
  modified_base 20: mod_base = OTHER; note = 2'-O-methylcytidine-3'-phosphate
  modified_base 21: mod_base = OTHER; note = 2'-O-methylcytidine-3'- phosphorothioate
  modified_base 22: mod_base = OTHER; note = 2'-O-methyladenosine-3'- phosphorothioate
  modified_base 23: mod_base = OTHER; note = 2'-O-methylguanosine-3'-phosphate
tggatttatacactggatcccag

SEQ ID NO: 3916 - RNA, 23 nt, synthetic construct
  misc_feature 1..23: note = Description of Artificial Sequence: Synthetic oligonucleotide
  source 1..23: mol_type = other RNA
  modified_base 1: mod_base = OTHER; note = 2'-O-methyluridine-3'-phosphorothioate
  modified_base 2: mod_base = OTHER; note = 2'-fluorouridine -3'-phosphorothioate
  modified_base 3: mod_base = OTHER; note = 2'-O-methylcytidine-3'-phosphate
  modified_base 4: mod_base = OTHER; note = 2'-O-methyladenosine-3'-phosphate
  modified_base 5: mod_base = OTHER; note = 2'-O-methylcytidine-3'-phosphate
  modified_base 6: mod_base = OTHER; note = 2'-fluorouridine-3'-phosphate
  modified_base 7: mod_base = OTHER; note = 2'-O-methylguanosine-3'-phosphate
  modified_base 8: mod_base = OTHER; note = 2'-fluorouridine-3'-phosphate
  modified_base 9: mod_base = OTHER; note = 2'-fluorouridine-3'-phosphate
  modified_base 10: mod_base = OTHER; note = 2'-O-methylcytidine-3'-phosphate
  modified_base 11: mod_base = OTHER; note = 2'-O-methyladenosine-3'-phosphate
  modified_base 12: mod_base = OTHER; note = 2'-O-methyladenosine-3'-phosphate
  modified_base 13: mod_base = OTHER; note = 2'-O-methylguanosine-3'-phosphate
  modified_base 14: mod_base = OTHER; note = 2'-fluoroguanosine-3'-phosphate
  modified_base 15: mod_base = OTHER; note = 2'-O-methyluridine-3'-phosphate
  modified_base 16: mod_base = OTHER; note = 2'-fluorouridine-3'-phosphate
  modified_base 17: mod_base = OTHER; note = 2'-O-methyluridine-3'-phosphate
  modified_base 18: mod_base = OTHER; note = 2'-O-methyladenosine-3'-phosphate
  modified_base 19: mod_base = OTHER; note = 2'-O-methyluridine-3'-phosphate
  modified_base 20: mod_base = OTHER; note = 2'-O-methyluridine-3'-phosphate
  modified_base 21: mod_base = OTHER; note = 2'-O-methylguanosine-3'- phosphorothioate
  modified_base 22: mod_base = OTHER; note = 2'-O-methylguanosine-3'- phosphorothioate
  modified_base 23: mod_base = OTHER; note = 2'-O-methylguanosine-3'-phosphate
ttcactgttcaaggtttattggg

SEQ ID NO: 3917 - RNA, 23 nt, synthetic construct
  misc_feature 1..23: note = Description of Artificial Sequence: Synthetic oligonucleotide
  source 1..23: mol_type = other RNA
  modified_base 1: mod_base = OTHER; note = 2'-O-methyladenosine-3'- phosphorothioate
  modified_base 2: mod_base = OTHER; note = 2'-fluoroadenosine-3'-phosphorothioate
  modified_base 3: mod_base = OTHER; note = 2'-O-methylguanosine-3'-phosphate
  modified_base 4: mod_base = OTHER; note = 2'-O-methyladenosine-3'-phosphate
  modified_base 5: mod_base = OTHER; note = 2'-O-methyluridine-3'-phosphate
  modified_base 6: mod_base = OTHER; note = 2'-fluoroadenosine-3'-phosphate
  modified_base 7: mod_base = OTHER; note = 2'-O-methylcytidine-3'-phosphate
  modified_base 8: mod_base = OTHER; note = 2'-fluorouridine-3'-phosphate
  modified_base 9: mod_base = OTHER; note = 2'-fluoroguanosine-3'-phosphate
  modified_base 10: mod_base = OTHER; note = 2'-O-methyladenosine-3'-phosphate
  modified_base 11: mod_base = OTHER; note = 2'-O-methyluridine-3'-phosphate
  modified_base 12: mod_base = OTHER; note = 2'-O-methylguanosine-3'-phosphate
  modified_base 13: mod_base = OTHER; note = 2'-O-methylguanosine-3'-phosphate
  modified_base 14: mod_base = OTHER; note = 2'-fluorocytidine-3'-phosphate
  modified_base 15: mod_base = OTHER; note = 2'-O-methyladenosine-3'-phosphate
  modified_base 16: mod_base = OTHER; note = 2'-fluorocytidine-3'-phosphate
  modified_base 17: mod_base = OTHER; note = 2'-O-methyladenosine-3'-phosphate
  modified_base 18: mod_base = OTHER; note = 2'-O-methylguanosine-3'-phosphate
  modified_base 19: mod_base = OTHER; note = 2'-O-methylguanosine-3'-phosphate
  modified_base 20: mod_base = OTHER; note = 2'-O-methylcytidine-3'-phosphate
  modified_base 21: mod_base = OTHER; note = 2'-O-methylcytidine-3'- phosphorothioate
  modified_base 22: mod_base = OTHER; note = 2'-O-methyladenosine-3'- phosphorothioate
  modified_base 23: mod_base = OTHER; note = 2'-O-methyluridine-3'-phosphate
aagatactgatggcacaggccat

SEQ ID NO: 3918 - RNA, 23 nt, synthetic construct
  misc_feature 1..23: note = Description of Artificial Sequence: Synthetic oligonucleotide
  source 1..23: mol_type = other RNA
  modified_base 1: mod_base = OTHER; note = 2'-O-methyluridine-3'-phosphorothioate
  modified_base 2: mod_base = OTHER; note = 2'-fluoroguanosine-3'-phosphorothioate
  modified_base 3: mod_base = OTHER; note = 2'-O-methyluridine-3'-phosphate
  modified_base 4: mod_base = OTHER; note = 2'-O-methylcytidine-3'-phosphate
  modified_base 5: mod_base = OTHER; note = 2'-O-methyluridine-3'-phosphate
  modified_base 6: mod_base = OTHER; note = 2'-fluorouridine-3'-phosphate
  modified_base 7: mod_base = OTHER; note = 2'-O-methylcytidine-3'-phosphate
  modified_base 8: mod_base = OTHER; note = 2'-fluoroguanosine-3'-phosphate
  modified_base 9: mod_base = OTHER; note = 2'-fluoroadenosine-3'-phosphate
  modified_base 10: mod_base = OTHER; note = 2'-O-methyluridine-3'-phosphate
  modified_base 11: mod_base = OTHER; note = 2'-O-methylguanosine-3'-phosphate
  modified_base 12: mod_base = OTHER; note = 2'-O-methyladenosine-3'-phosphate
  modified_base 13: mod_base = OTHER; note = 2'-O-methylcytidine-3'-phosphate
  modified_base 14: mod_base = OTHER; note = 2'-fluoroadenosine-3'-phosphate
  modified_base 15: mod_base = OTHER; note = 2'-O-methyluridine-3'-phosphate
  modified_base 16: mod_base = OTHER; note = 2'-fluorocytidine-3'-phosphate
  modified_base 17: mod_base = OTHER; note = 2'-O-methyladenosine-3'-phosphate
  modified_base 18: mod_base = OTHER; note = 2'-O-methyladenosine-3'-phosphate
  modified_base 19: mod_base = OTHER; note = 2'-O-methylcytidine-3'-phosphate
  modified_base 20: mod_base = OTHER; note = 2'-O-methyladenosine-3'-phosphate
  modified_base 21: mod_base = OTHER; note = 2'-O-methyladenosine-3'- phosphorothioate
  modified_base 22: mod_base = OTHER; note = 2'-O-methylguanosine-3'- phosphorothioate
  modified_base 23: mod_base = OTHER; note = 2'-O-methyladenosine-3'-phosphate
tgtcttcgatgacatcaacaaga

SEQ ID NO: 3919 - RNA, 23 nt, synthetic construct
  misc_feature 1..23: note = Description of Artificial Sequence: Synthetic oligonucleotide
  source 1..23: mol_type = other RNA
  modified_base 1: mod_base = OTHER; note = 2'-O-methyladenosine-3'- phosphorothioate
  modified_base 2: mod_base = OTHER; note = 2'-fluorouridine -3'-phosphorothioate
  modified_base 3: mod_base = OTHER; note = 2'-O-methyluridine-3'-phosphate
  modified_base 4: mod_base = OTHER; note = 2'-O-methyladenosine-3'-phosphate
  modified_base 5: mod_base = OTHER; note = 2'-O-methyluridine-3'-phosphate
  modified_base 6: mod_base = OTHER; note = 2'-fluoroadenosine-3'-phosphate
  modified_base 7: mod_base = OTHER; note = 2'-O-methylcytidine-3'-phosphate
  modified_base 8: mod_base = OTHER; note = 2'-fluorouridine-3'-phosphate
  modified_base 9: mod_base = OTHER; note = 2'-fluorocytidine-3'-phosphate
  modified_base 10: mod_base = OTHER; note = 2'-O-methyluridine-3'-phosphate
  modified_base 11: mod_base = OTHER; note = 2'-O-methylcytidine-3'-phosphate
  modified_base 12: mod_base = OTHER; note = 2'-O-methyluridine-3'-phosphate
  modified_base 13: mod_base = OTHER; note = 2'-O-methylguanosine-3'-phosphate
  modified_base 14: mod_base = OTHER; note = 2'-fluorocytidine-3'-phosphate
  modified_base 15: mod_base = OTHER; note = 2'-O-methylcytidine-3'-phosphate
  modified_base 16: mod_base = OTHER; note = 2'-fluoroadenosine-3'-phosphate
  modified_base 17: mod_base = OTHER; note = 2'-O-methyladenosine-3'-phosphate
  modified_base 18: mod_base = OTHER; note = 2'-O-methyladenosine-3'-phosphate
  modified_base 19: mod_base = OTHER; note = 2'-O-methyluridine-3'-phosphate
  modified_base 20: mod_base = OTHER; note = 2'-O-methylcytidine-3'-phosphate
  modified_base 21: mod_base = OTHER; note = 2'-O-methyluridine-3'-phosphorothioate
  modified_base 22: mod_base = OTHER; note = 2'-O-methylguanosine-3'- phosphorothioate
  modified_base 23: mod_base = OTHER; note = 2'-O-methylcytidine-3'-phosphate
attatactctctgccaaatctgc

SEQ ID NO: 3920 - RNA, 23 nt, synthetic construct
  misc_feature 1..23: note = Description of Artificial Sequence: Synthetic oligonucleotide
  source 1..23: mol_type = other RNA
  modified_base 1: mod_base = OTHER; note = 2'-O-methyluridine-3'-phosphorothioate
  modified_base 2: mod_base = OTHER; note = 2'-fluoroadenosine-3'-phosphorothioate
  modified_base 3: mod_base = OTHER; note = 2'-O-methylcytidine-3'-phosphate
  modified_base 4: mod_base = OTHER; note = 2'-O-methylcytidine-3'-phosphate
  modified_base 5: mod_base = OTHER; note = 2'-O-methylcytidine-3'-phosphate
  modified_base 6: mod_base = OTHER; note = 2'-fluorouridine-3'-phosphate
  modified_base 7: mod_base = OTHER; note = 2'-O-methyluridine-3'-phosphate
  modified_base 8: mod_base = OTHER; note = 2'-fluoroadenosine-3'-phosphate
  modified_base 9: mod_base = OTHER; note = 2'-fluoroadenosine-3'-phosphate
  modified_base 10: mod_base = OTHER; note = 2'-O-methyluridine-3'-phosphate
  modified_base 11: mod_base = OTHER; note = 2'-O-methylcytidine-3'-phosphate
  modified_base 12: mod_base = OTHER; note = 2'-O-methyladenosine-3'-phosphate
  modified_base 13: mod_base = OTHER; note = 2'-O-methyluridine-3'-phosphate
  modified_base 14: mod_base = OTHER; note = 2'-fluoroguanosine-3'-phosphate
  modified_base 15: mod_base = OTHER; note = 2'-O-methylguanosine-3'-phosphate
  modified_base 16: mod_base = OTHER; note = 2'-fluorouridine-3'-phosphate
  modified_base 17: mod_base = OTHER; note = 2'-O-methylguanosine-3'-phosphate
  modified_base 18: mod_base = OTHER; note = 2'-O-methylguanosine-3'-phosphate
  modified_base 19: mod_base = OTHER; note = 2'-O-methyladenosine-3'-phosphate
  modified_base 20: mod_base = OTHER; note = 2'-O-methyladenosine-3'-phosphate
  modified_base 21: mod_base = OTHER; note = 2'-O-methyladenosine-3'- phosphorothioate
  modified_base 22: mod_base = OTHER; note = 2'-O-methylcytidine-3'- phosphorothioate
  modified_base 23: mod_base = OTHER; note = 2'-O-methyluridine-3'-phosphate
tacccttaatcatggtggaaact

SEQ ID NO: 3921 - RNA, 23 nt, synthetic construct
  misc_feature 1..23: note = Description of Artificial Sequence: Synthetic oligonucleotide
  source 1..23: mol_type = other RNA
  modified_base 1: mod_base = OTHER; note = 2'-O-methyluridine-3'-phosphorothioate
  modified_base 2: mod_base = OTHER; note = 2'-fluoroadenosine-3'-phosphorothioate
  modified_base 3: mod_base = OTHER; note = 2'-O-methylguanosine-3'-phosphate
  modified_base 4: mod_base = OTHER; note = 2'-O-methyladenosine-3'-phosphate
  modified_base 5: mod_base = OTHER; note = 2'-O-methyladenosine-3'-phosphate
  modified_base 6: mod_base = OTHER; note = 2'-fluorouridine-3'-phosphate
  modified_base 7: mod_base = OTHER; note = 2'-O-methylcytidine-3'-phosphate
  modified_base 8: mod_base = OTHER; note = 2'-fluorocytidine-3'-phosphate
  modified_base 9: mod_base = OTHER; note = 2'-fluorouridine-3'-phosphate
  modified_base 10: mod_base = OTHER; note = 2'-O-methylguanosine-3'-phosphate
  modified_base 11: mod_base = OTHER; note = 2'-O-methyluridine-3'-phosphate
  modified_base 12: mod_base = OTHER; note = 2'-O-methyluridine-3'-phosphate
  modified_base 13: mod_base = OTHER; note = 2'-O-methylguanosine-3'-phosphate
  modified_base 14: mod_base = OTHER; note = 2'-fluorouridine-3'-phosphate
  modified_base 15: mod_base = OTHER; note = 2'-O-methyladenosine-3'-phosphate
  modified_base 16: mod_base = OTHER; note = 2'-fluoroguanosine-3'-phosphate
  modified_base 17: mod_base = OTHER; note = 2'-O-methylcytidine-3'-phosphate
  modified_base 18: mod_base = OTHER; note = 2'-O-methylcytidine-3'-phosphate
  modified_base 19: mod_base = OTHER; note = 2'-O-methyluridine-3'-phosphate
  modified_base 20: mod_base = OTHER; note = 2'-O-methyladenosine-3'-phosphate
  modified_base 21: mod_base = OTHER; note = 2'-O-methylguanosine-3'- phosphorothioate
  modified_base 22: mod_base = OTHER; note = 2'-O-methyladenosine-3'- phosphorothioate
  modified_base 23: mod_base = OTHER; note = 2'-O-methylcytidine-3'-phosphate
tagaatcctgttgtagcctagac

SEQ ID NO: 3922 - RNA, 23 nt, synthetic construct
  misc_feature 1..23: note = Description of Artificial Sequence: Synthetic oligonucleotide
  source 1..23: mol_type = other RNA
  modified_base 1: mod_base = OTHER; note = 2'-O-methyluridine-3'-phosphorothioate
  modified_base 2: mod_base = OTHER; note = 2'-fluoroguanosine-3'-phosphorothioate
  modified_base 3: mod_base = OTHER; note = 2'-O-methyladenosine-3'-phosphate
  modified_base 4: mod_base = OTHER; note = 2'-O-methylcytidine-3'-phosphate
  modified_base 5: mod_base = OTHER; note = 2'-O-methyladenosine-3'-phosphate
  modified_base 6: mod_base = OTHER; note = 2'-fluoroadenosine-3'-phosphate
  modified_base 7: mod_base = OTHER; note = 2'-O-methylcytidine-3'-phosphate
  modified_base 8: mod_base = OTHER; note = 2'-fluoroadenosine-3'-phosphate
  modified_base 9: mod_base = OTHER; note = 2'-fluorouridine-3'-phosphate
  modified_base 10: mod_base = OTHER; note = 2'-O-methylguanosine-3'-phosphate
  modified_base 11: mod_base = OTHER; note = 2'-O-methylcytidine-3'-phosphate
  modified_base 12: mod_base = OTHER; note = 2'-O-methyladenosine-3'-phosphate
  modified_base 13: mod_base = OTHER; note = 2'-O-methylcytidine-3'-phosphate
  modified_base 14: mod_base = OTHER; note = 2'-fluoroadenosine-3'-phosphate
  modified_base 15: mod_base = OTHER; note = 2'-O-methyladenosine-3'-phosphate
  modified_base 16: mod_base = OTHER; note = 2'-fluorocytidine-3'-phosphate
  modified_base 17: mod_base = OTHER; note = 2'-O-methylcytidine-3'-phosphate
  modified_base 18: mod_base = OTHER; note = 2'-O-methyluridine-3'-phosphate
  modified_base 19: mod_base = OTHER; note = 2'-O-methylcytidine-3'-phosphate
  modified_base 20: mod_base = OTHER; note = 2'-O-methylcytidine-3'-phosphate
  modified_base 21: mod_base = OTHER; note = 2'-O-methyladenosine-3'- phosphorothioate
  modified_base 22: mod_base = OTHER; note = 2'-O-methylcytidine-3'- phosphorothioate
  modified_base 23: mod_base = OTHER; note = 2'-O-methylcytidine-3'-phosphate
tgacaacatgcacaacctccacc

SEQ ID NO: 3923 - RNA, 23 nt, synthetic construct
  misc_feature 1..23: note = Description of Artificial Sequence: Synthetic oligonucleotide
  source 1..23: mol_type = other RNA
  modified_base 1: mod_base = OTHER; note = 2'-O-methyladenosine-3'- phosphorothioate
  modified_base 2: mod_base = OTHER; note = 2'-fluoroguanosine-3'-phosphorothioate
  modified_base 3: mod_base = OTHER; note = 2'-O-methylguanosine-3'-phosphate
  modified_base 4: mod_base = OTHER; note = 2'-O-methylcytidine-3'-phosphate
  modified_base 5: mod_base = OTHER; note = 2'-O-methyladenosine-3'-phosphate
  modified_base 6: mod_base = OTHER; note = 2'-fluorouridine-3'-phosphate
  modified_base 7: mod_base = OTHER; note = 2'-O-methylguanosine-3'-phosphate
  modified_base 8: mod_base = OTHER; note = 2'-fluorouridine-3'-phosphate
  modified_base 9: mod_base = OTHER; note = 2'-fluorouridine-3'-phosphate
  modified_base 10: mod_base = OTHER; note = 2'-O-methylcytidine-3'-phosphate
  modified_base 11: mod_base = OTHER; note = 2'-O-methyladenosine-3'-phosphate
  modified_base 12: mod_base = OTHER; note = 2'-O-methylguanosine-3'-phosphate
  modified_base 13: mod_base = OTHER; note = 2'-O-methyluridine-3'-phosphate
  modified_base 14: mod_base = OTHER; note = 2'-fluoroguanosine-3'-phosphate
  modified_base 15: mod_base = OTHER; note = 2'-O-methyladenosine-3'-phosphate
  modified_base 16: mod_base = OTHER; note = 2'-fluoroadenosine-3'-phosphate
  modified_base 17: mod_base = OTHER; note = 2'-O-methylguanosine-3'-phosphate
  modified_base 18: mod_base = OTHER; note = 2'-O-methylguanosine-3'-phosphate
  modified_base 19: mod_base = OTHER; note = 2'-O-methyladenosine-3'-phosphate
  modified_base 20: mod_base = OTHER; note = 2'-O-methylguanosine-3'-phosphate
  modified_base 21: mod_base = OTHER; note = 2'-O-methylcytidine-3'- phosphorothioate
  modified_base 22: mod_base = OTHER; note = 2'-O-methylcytidine-3'- phosphorothioate
  modified_base 23: mod_base = OTHER; note = 2'-O-methyladenosine-3'-phosphate
aggcatgttcagtgaaggagcca

SEQ ID NO: 3924 - RNA, 23 nt, synthetic construct
  misc_feature 1..23: note = Description of Artificial Sequence: Synthetic oligonucleotide
  source 1..23: mol_type = other RNA
  modified_base 1: mod_base = OTHER; note = 2'-O-methyluridine-3'-phosphorothioate
  modified_base 2: mod_base = OTHER; note = 2'-fluoroadenosine-3'-phosphorothioate
  modified_base 3: mod_base = OTHER; note = 2'-O-methyluridine-3'-phosphate
  modified_base 4: mod_base = OTHER; note = 2'-O-methyluridine-3'-phosphate
  modified_base 5: mod_base = OTHER; note = 2'-O-methylguanosine-3'-phosphate
  modified_base 6: mod_base = OTHER; note = 2'-fluoroguanosine-3'-phosphate
  modified_base 7: mod_base = OTHER; note = 2'-O-methyladenosine-3'-phosphate
  modified_base 8: mod_base = OTHER; note = 2'-fluorocytidine-3'-phosphate
  modified_base 9: mod_base = OTHER; note = 2'-fluorouridine-3'-phosphate
  modified_base 10: mod_base = OTHER; note = 2'-O-methyluridine-3'-phosphate
  modified_base 11: mod_base = OTHER; note = 2'-O-methylguanosine-3'-phosphate
  modified_base 12: mod_base = OTHER; note = 2'-O-methylguanosine-3'-phosphate
  modified_base 13: mod_base = OTHER; note = 2'-O-methyladenosine-3'-phosphate
  modified_base 14: mod_base = OTHER; note = 2'-fluoroadenosine-3'-phosphate
  modified_base 15: mod_base = OTHER; note = 2'-O-methylcytidine-3'-phosphate
  modified_base 16: mod_base = OTHER; note = 2'-fluorocytidine-3'-phosphate
  modified_base 17: mod_base = OTHER; note = 2'-O-methyladenosine-3'-phosphate
  modified_base 18: mod_base = OTHER; note = 2'-O-methyladenosine-3'-phosphate
  modified_base 19: mod_base = OTHER; note = 2'-O-methyladenosine-3'-phosphate
  modified_base 20: mod_base = OTHER; note = 2'-O-methyladenosine-3'-phosphate
  modified_base 21: mod_base = OTHER; note = 2'-O-methylguanosine-3'- phosphorothioate
  modified_base 22: mod_base = OTHER; note = 2'-O-methylguanosine-3'- phosphorothioate
  modified_base 23: mod_base = OTHER; note = 2'-O-methyladenosine-3'-phosphate
tattggacttggaaccaaaagga

SEQ ID NO: 3925 - RNA, 23 nt, synthetic construct
  misc_feature 1..23: note = Description of Artificial Sequence: Synthetic oligonucleotide
  source 1..23: mol_type = other RNA
  modified_base 1: mod_base = OTHER; note = 2'-O-methyluridine-3'-phosphorothioate
  modified_base 2: mod_base = OTHER; note = 2'-fluoroadenosine-3'-phosphorothioate
  modified_base 3: mod_base = OTHER; note = 2'-O-methyladenosine-3'-phosphate
  modified_base 4: mod_base = OTHER; note = 2'-O-methylguanosine-3'-phosphate
  modified_base 5: mod_base = OTHER; note = 2'-O-methyladenosine-3'-phosphate
  modified_base 6: mod_base = OTHER; note = 2'-fluorouridine-3'-phosphate
  modified_base 7: mod_base = OTHER; note = 2'-O-methyladenosine-3'-phosphate
  modified_base 8: mod_base = OTHER; note = 2'-fluorocytidine-3'-phosphate
  modified_base 9: mod_base = OTHER; note = 2'-fluorouridine-3'-phosphate
  modified_base 10: mod_base = OTHER; note = 2'-O-methylguanosine-3'-phosphate
  modified_base 11: mod_base = OTHER; note = 2'-O-methyladenosine-3'-phosphate
  modified_base 12: mod_base = OTHER; note = 2'-O-methyluridine-3'-phosphate
  modified_base 13: mod_base = OTHER; note = 2'-O-methylguanosine-3'-phosphate
  modified_base 14: mod_base = OTHER; note = 2'-fluoroguanosine-3'-phosphate
  modified_base 15: mod_base = OTHER; note = 2'-O-methylcytidine-3'-phosphate
  modified_base 16: mod_base = OTHER; note = 2'-fluoroadenosine-3'-phosphate
  modified_base 17: mod_base = OTHER; note = 2'-O-methylcytidine-3'-phosphate
  modified_base 18: mod_base = OTHER; note = 2'-O-methyladenosine-3'-phosphate
  modified_base 19: mod_base = OTHER; note = 2'-O-methylguanosine-3'-phosphate
  modified_base 20: mod_base = OTHER; note = 2'-O-methylguanosine-3'-phosphate
  modified_base 21: mod_base = OTHER; note = 2'-O-methylcytidine-3'- phosphorothioate
  modified_base 22: mod_base = OTHER; note = 2'-O-methylcytidine-3'- phosphorothioate
  modified_base 23: mod_base = OTHER; note = 2'-O-methyladenosine-3'-phosphate
taagatactgatggcacaggcca

SEQ ID NO: 3926 - RNA, 23 nt, synthetic construct
  misc_feature 1..23: note = Description of Artificial Sequence: Synthetic oligonucleotide
  source 1..23: mol_type = other RNA
  modified_base 1: mod_base = OTHER; note = 2'-O-methyluridine-3'-phosphorothioate
  modified_base 2: mod_base = OTHER; note = 2'-fluoroadenosine-3'-phosphorothioate
  modified_base 3: mod_base = OTHER; note = 2'-O-methylguanosine-3'-phosphate
  modified_base 4: mod_base = OTHER; note = 2'-O-methyluridine-3'-phosphate
  modified_base 5: mod_base = OTHER; note = 2'-O-methyluridine-3'-phosphate
  modified_base 6: mod_base = OTHER; note = 2'-fluorouridine-3'-phosphate
  modified_base 7: mod_base = OTHER; note = 2'-O-methylguanosine-3'-phosphate
  modified_base 8: mod_base = OTHER; note = 2'-fluoroadenosine-3'-phosphate
  modified_base 9: mod_base = OTHER; note = 2'-fluorouridine-3'-phosphate
  modified_base 10: mod_base = OTHER; note = 2'-O-methylcytidine-3'-phosphate
  modified_base 11: mod_base = OTHER; note = 2'-O-methyladenosine-3'-phosphate
  modified_base 12: mod_base = OTHER; note = 2'-O-methylcytidine-3'-phosphate
  modified_base 13: mod_base = OTHER; note = 2'-O-methylcytidine-3'-phosphate
  modified_base 14: mod_base = OTHER; note = 2'-fluorouridine-3'-phosphate
  modified_base 15: mod_base = OTHER; note = 2'-O-methylcytidine-3'-phosphate
  modified_base 16: mod_base = OTHER; note = 2'-fluoroadenosine-3'-phosphate
  modified_base 17: mod_base = OTHER; note = 2'-O-methyluridine-3'-phosphate
  modified_base 18: mod_base = OTHER; note = 2'-O-methyladenosine-3'-phosphate
  modified_base 19: mod_base = OTHER; note = 2'-O-methyladenosine-3'-phosphate
  modified_base 20: mod_base = OTHER; note = 2'-O-methylguanosine-3'-phosphate
  modified_base 21: mod_base = OTHER; note = 2'-O-methylcytidine-3'- phosphorothioate
  modified_base 22: mod_base = OTHER; note = 2'-O-methyladenosine-3'- phosphorothioate
  modified_base 23: mod_base = OTHER; note = 2'-O-methylcytidine-3'-phosphate
tagtttgatcacctcataagcac

SEQ ID NO: 3927 - RNA, 23 nt, synthetic construct
  misc_feature 1..23: note = Description of Artificial Sequence: Synthetic oligonucleotide
  source 1..23: mol_type = other RNA
  modified_base 1: mod_base = OTHER; note = 2'-O-methyluridine-3'-phosphorothioate
  modified_base 2: mod_base = OTHER; note = 2'-fluoroguanosine-3'-phosphorothioate
  modified_base 3: mod_base = OTHER; note = 2'-O-methyladenosine-3'-phosphate
  modified_base 4: mod_base = OTHER; note = 2'-O-methylguanosine-3'-phosphate
  modified_base 5: mod_base = OTHER; note = 2'-O-methyluridine-3'-phosphate
  modified_base 6: mod_base = OTHER; note = 2'-fluorouridine-3'-phosphate
  modified_base 7: mod_base = OTHER; note = 2'-O-methyluridine-3'-phosphate
  modified_base 8: mod_base = OTHER; note = 2'-fluoroguanosine-3'-phosphate
  modified_base 9: mod_base = OTHER; note = 2'-fluoroadenosine-3'-phosphate
  modified_base 10: mod_base = OTHER; note = 2'-O-methyluridine-3'-phosphate
  modified_base 11: mod_base = OTHER; note = 2'-O-methylcytidine-3'-phosphate
  modified_base 12: mod_base = OTHER; note = 2'-O-methyladenosine-3'-phosphate
  modified_base 13: mod_base = OTHER; note = 2'-O-methylcytidine-3'-phosphate
  modified_base 14: mod_base = OTHER; note = 2'-fluorocytidine-3'-phosphate
  modified_base 15: mod_base = OTHER; note = 2'-O-methyluridine-3'-phosphate
  modified_base 16: mod_base = OTHER; note = 2'-fluorocytidine-3'-phosphate
  modified_base 17: mod_base = OTHER; note = 2'-O-methyladenosine-3'-phosphate
  modified_base 18: mod_base = OTHER; note = 2'-O-methyluridine-3'-phosphate
  modified_base 19: mod_base = OTHER; note = 2'-O-methyladenosine-3'-phosphate
  modified_base 20: mod_base = OTHER; note = 2'-O-methyladenosine-3'-phosphate
  modified_base 21: mod_base = OTHER; note = 2'-O-methylguanosine-3'- phosphorothioate
  modified_base 22: mod_base = OTHER; note = 2'-O-methylcytidine-3'- phosphorothioate
  modified_base 23: mod_base = OTHER; note = 2'-O-methyladenosine-3'-phosphate
tgagtttgatcacctcataagca

SEQ ID NO: 3928 - RNA, 23 nt, synthetic construct
  misc_feature 1..23: note = Description of Artificial Sequence: Synthetic oligonucleotide
  source 1..23: mol_type = other RNA
  modified_base 1: mod_base = OTHER; note = 2'-O-methyladenosine-3'- phosphorothioate
  modified_base 2: mod_base = OTHER; note = 2'-fluorouridine -3'-phosphorothioate
  modified_base 3: mod_base = OTHER; note = 2'-O-methyluridine-3'-phosphate
  modified_base 4: mod_base = OTHER; note = 2'-O-methylcytidine-3'-phosphate
  modified_base 5: mod_base = OTHER; note = 2'-O-methyluridine-3'-phosphate
  modified_base 6: mod_base = OTHER; note = 2'-fluoroguanosine-3'-phosphate
  modified_base 7: mod_base = OTHER; note = 2'-O-methyluridine-3'-phosphate
  modified_base 8: mod_base = OTHER; note = 2'-fluorocytidine-3'-phosphate
  modified_base 9: mod_base = OTHER; note = 2'-fluorocytidine-3'-phosphate
  modified_base 10: mod_base = OTHER; note = 2'-O-methylcytidine-3'-phosphate
  modified_base 11: mod_base = OTHER; note = 2'-O-methyladenosine-3'-phosphate
  modified_base 12: mod_base = OTHER; note = 2'-O-methyladenosine-3'-phosphate
  modified_base 13: mod_base = OTHER; note = 2'-O-methyladenosine-3'-phosphate
  modified_base 14: mod_base = OTHER; note = 2'-fluoroadenosine-3'-phosphate
  modified_base 15: mod_base = OTHER; note = 2'-O-methyluridine-3'-phosphate
  modified_base 16: mod_base = OTHER; note = 2'-fluoroguanosine-3'-phosphate
  modified_base 17: mod_base = OTHER; note = 2'-O-methylcytidine-3'-phosphate
  modified_base 18: mod_base = OTHER; note = 2'-O-methyladenosine-3'-phosphate
  modified_base 19: mod_base = OTHER; note = 2'-O-methyladenosine-3'-phosphate
  modified_base 20: mod_base = OTHER; note = 2'-O-methylguanosine-3'-phosphate
  modified_base 21: mod_base = OTHER; note = 2'-O-methylguanosine-3'- phosphorothioate
  modified_base 22: mod_base = OTHER; note = 2'-O-methyladenosine-3'- phosphorothioate
  modified_base 23: mod_base = OTHER; note = 2'-O-methyladenosine-3'-phosphate
attctgtcccaaaatgcaaggaa

SEQ ID NO: 3929 - RNA, 23 nt, synthetic construct
  misc_feature 1..23: note = Description of Artificial Sequence: Synthetic oligonucleotide
  source 1..23: mol_type = other RNA
  modified_base 1: mod_base = OTHER; note = 2'-O-methyluridine-3'-phosphorothioate
  modified_base 2: mod_base = OTHER; note = 2'-fluoroguanosine-3'-phosphorothioate
  modified_base 3: mod_base = OTHER; note = 2'-O-methylcytidine-3'-phosphate
  modified_base 4: mod_base = OTHER; note = 2'-O-methylcytidine-3'-phosphate
  modified_base 5: mod_base = OTHER; note = 2'-O-methyladenosine-3'-phosphate
  modified_base 6: mod_base = OTHER; note = 2'-fluorouridine-3'-phosphate
  modified_base 7: mod_base = OTHER; note = 2'-O-methyladenosine-3'-phosphate
  modified_base 8: mod_base = OTHER; note = 2'-fluorouridine-3'-phosphate
  modified_base 9: mod_base = OTHER; note = 2'-fluorouridine-3'-phosphate
  modified_base 10: mod_base = OTHER; note = 2'-O-methylguanosine-3'-phosphate
  modified_base 11: mod_base = OTHER; note = 2'-O-methylguanosine-3'-phosphate
  modified_base 12: mod_base = OTHER; note = 2'-O-methyladenosine-3'-phosphate
  modified_base 13: mod_base = OTHER; note = 2'-O-methylcytidine-3'-phosphate
  modified_base 14: mod_base = OTHER; note = 2'-fluorouridine-3'-phosphate
  modified_base 15: mod_base = OTHER; note = 2'-O-methyluridine-3'-phosphate
  modified_base 16: mod_base = OTHER; note = 2'-fluoroguanosine-3'-phosphate
  modified_base 17: mod_base = OTHER; note = 2'-O-methylguanosine-3'-phosphate
  modified_base 18: mod_base = OTHER; note = 2'-O-methyladenosine-3'-phosphate
  modified_base 19: mod_base = OTHER; note = 2'-O-methyladenosine-3'-phosphate
  modified_base 20: mod_base = OTHER; note = 2'-O-methylcytidine-3'-phosphate
  modified_base 21: mod_base = OTHER; note = 2'-O-methylcytidine-3'- phosphorothioate
  modified_base 22: mod_base = OTHER; note = 2'-O-methyladenosine-3'- phosphorothioate
  modified_base 23: mod_base = OTHER; note = 2'-O-methyladenosine-3'-phosphate
tgccatattggacttggaaccaa

SEQ ID NO: 3930 - RNA, 23 nt, synthetic construct
  misc_feature 1..23: note = Description of Artificial Sequence: Synthetic oligonucleotide
  source 1..23: mol_type = other RNA
  modified_base 1: mod_base = OTHER; note = 2'-O-methyluridine-3'-phosphorothioate
  modified_base 2: mod_base = OTHER; note = 2'-fluorocytidine-3'-phosphorothioate
  modified_base 3: mod_base = OTHER; note = 2'-O-methyluridine-3'-phosphate
  modified_base 4: mod_base = OTHER; note = 2'-O-methylguanosine-3'-phosphate
  modified_base 5: mod_base = OTHER; note = 2'-O-methyluridine-3'-phosphate
  modified_base 6: mod_base = OTHER; note = 2'-fluorouridine-3'-phosphate
  modified_base 7: mod_base = OTHER; note = 2'-O-methylguanosine-3'-phosphate
  modified_base 8: mod_base = OTHER; note = 2'-fluorouridine-3'-phosphate
  modified_base 9: mod_base = OTHER; note = 2'-fluoroadenosine-3'-phosphate
  modified_base 10: mod_base = OTHER; note = 2'-O-methylguanosine-3'-phosphate
  modified_base 11: mod_base = OTHER; note = 2'-O-methylcytidine-3'-phosphate
  modified_base 12: mod_base = OTHER; note = 2'-O-methylcytidine-3'-phosphate
  modified_base 13: mod_base = OTHER; note = 2'-O-methyluridine-3'-phosphate
  modified_base 14: mod_base = OTHER; note = 2'-fluoroadenosine-3'-phosphate
  modified_base 15: mod_base = OTHER; note = 2'-O-methylguanosine-3'-phosphate
  modified_base 16: mod_base = OTHER; note = 2'-fluoroadenosine-3'-phosphate
  modified_base 17: mod_base = OTHER; note = 2'-O-methylcytidine-3'-phosphate
  modified_base 18: mod_base = OTHER; note = 2'-O-methyladenosine-3'-phosphate
  modified_base 19: mod_base = OTHER; note = 2'-O-methylguanosine-3'-phosphate
  modified_base 20: mod_base = OTHER; note = 2'-O-methyluridine-3'-phosphate
  modified_base 21: mod_base = OTHER; note = 2'-O-methylguanosine-3'- phosphorothioate
  modified_base 22: mod_base = OTHER; note = 2'-O-methyladenosine-3'- phosphorothioate
  modified_base 23: mod_base = OTHER; note = 2'-O-methyladenosine-3'-phosphate
tctgttgtagcctagacagtgaa

SEQ ID NO: 3931 - RNA, 23 nt, synthetic construct
  misc_feature 1..23: note = Description of Artificial Sequence: Synthetic oligonucleotide
  source 1..23: mol_type = other RNA
  modified_base 1: mod_base = OTHER; note = 2'-O-methyluridine-3'-phosphorothioate
  modified_base 2: mod_base = OTHER; note = 2'-fluorocytidine-3'-phosphorothioate
  modified_base 3: mod_base = OTHER; note = 2'-O-methylcytidine-3'-phosphate
  modified_base 4: mod_base = OTHER; note = 2'-O-methyluridine-3'-phosphate
  modified_base 5: mod_base = OTHER; note = 2'-O-methylguanosine-3'-phosphate
  modified_base 6: mod_base = OTHER; note = 2'-fluorouridine-3'-phosphate
  modified_base 7: mod_base = OTHER; note = 2'-O-methyluridine-3'-phosphate
  modified_base 8: mod_base = OTHER; note = 2'-fluoroguanosine-3'-phosphate
  modified_base 9: mod_base = OTHER; note = 2'-fluorouridine-3'-phosphate
  modified_base 10: mod_base = OTHER; note = 2'-O-methyladenosine-3'-phosphate
  modified_base 11: mod_base = OTHER; note = 2'-O-methylguanosine-3'-phosphate
  modified_base 12: mod_base = OTHER; note = 2'-O-methylcytidine-3'-phosphate
  modified_base 13: mod_base = OTHER; note = 2'-O-methylcytidine-3'-phosphate
  modified_base 14: mod_base = OTHER; note = 2'-fluorouridine-3'-phosphate
  modified_base 15: mod_base = OTHER; note = 2'-O-methyladenosine-3'-phosphate
  modified_base 16: mod_base = OTHER; note = 2'-fluoroguanosine-3'-phosphate
  modified_base 17: mod_base = OTHER; note = 2'-O-methyladenosine-3'-phosphate
  modified_base 18: mod_base = OTHER; note = 2'-O-methylcytidine-3'-phosphate
  modified_base 19: mod_base = OTHER; note = 2'-O-methyladenosine-3'-phosphate
  modified_base 20: mod_base = OTHER; note = 2'-O-methylguanosine-3'-phosphate
  modified_base 21: mod_base = OTHER; note = 2'-O-methyluridine-3'-phosphorothioate
  modified_base 22: mod_base = OTHER; note = 2'-O-methylguanosine-3'- phosphorothioate
  modified_base 23: mod_base = OTHER; note = 2'-O-methyladenosine-3'-phosphate
tcctgttgtagcctagacagtga

SEQ ID NO: 3932 - RNA, 23 nt, synthetic construct
  misc_feature 1..23: note = Description of Artificial Sequence: Synthetic oligonucleotide
  source 1..23: mol_type = other RNA
  modified_base 1: mod_base = OTHER; note = 2'-O-methyluridine-3'-phosphorothioate
  modified_base 2: mod_base = OTHER; note = 2'-fluorocytidine-3'-phosphorothioate
  modified_base 3: mod_base = OTHER; note = 2'-O-methylcytidine-3'-phosphate
  modified_base 4: mod_base = OTHER; note = 2'-O-methyladenosine-3'-phosphate
  modified_base 5: mod_base = OTHER; note = 2'-O-methyladenosine-3'-phosphate
  modified_base 6: mod_base = OTHER; note = 2'-fluorocytidine-3'-phosphate
  modified_base 7: mod_base = OTHER; note = 2'-O-methyladenosine-3'-phosphate
  modified_base 8: mod_base = OTHER; note = 2'-fluoroadenosine-3'-phosphate
  modified_base 9: mod_base = OTHER; note = 2'-fluorocytidine-3'-phosphate
  modified_base 10: mod_base = OTHER; note = 2'-O-methyluridine-3'-phosphate
  modified_base 11: mod_base = OTHER; note = 2'-O-methylguanosine-3'-phosphate
  modified_base 12: mod_base = OTHER; note = 2'-O-methyluridine-3'-phosphate
  modified_base 13: mod_base = OTHER; note = 2'-O-methyladenosine-3'-phosphate
  modified_base 14: mod_base = OTHER; note = 2'-fluoroadenosine-3'-phosphate
  modified_base 15: mod_base = OTHER; note = 2'-O-methyluridine-3'-phosphate
  modified_base 16: mod_base = OTHER; note = 2'-fluorocytidine-3'-phosphate
  modified_base 17: mod_base = OTHER; note = 2'-O-methyluridine-3'-phosphate
  modified_base 18: mod_base = OTHER; note = 2'-O-methyluridine-3'-phosphate
  modified_base 19: mod_base = OTHER; note = 2'-O-methyladenosine-3'-phosphate
  modified_base 20: mod_base = OTHER; note = 2'-O-methyluridine-3'-phosphate
  modified_base 21: mod_base = OTHER; note = 2'-O-methyluridine-3'-phosphorothioate
  modified_base 22: mod_base = OTHER; note = 2'-O-methylcytidine-3'- phosphorothioate
  modified_base 23: mod_base = OTHER; note = 2'-O-methyluridine-3'-phosphate
tccaacaactgtaatcttattct

SEQ ID NO: 3933 - RNA, 23 nt, synthetic construct
  misc_feature 1..23: note = Description of Artificial Sequence: Synthetic oligonucleotide
  source 1..23: mol_type = other RNA
  modified_base 1: mod_base = OTHER; note = 2'-O-methyluridine-3'-phosphorothioate
  modified_base 2: mod_base = OTHER; note = 2'-fluoroadenosine-3'-phosphorothioate
  modified_base 3: mod_base = OTHER; note = 2'-O-methylcytidine-3'-phosphate
  modified_base 4: mod_base = OTHER; note = 2'-O-methylcytidine-3'-phosphate
  modified_base 5: mod_base = OTHER; note = 2'-O-methyluridine-3'-phosphate
  modified_base 6: mod_base = OTHER; note = 2'-fluorocytidine-3'-phosphate
  modified_base 7: mod_base = OTHER; note = 2'-O-methyladenosine-3'-phosphate
  modified_base 8: mod_base = OTHER; note = 2'-fluorouridine-3'-phosphate
  modified_base 9: mod_base = OTHER; note = 2'-fluoroadenosine-3'-phosphate
  modified_base 10: mod_base = OTHER; note = 2'-O-methyladenosine-3'-phosphate
  modified_base 11: mod_base = OTHER; note = 2'-O-methylguanosine-3'-phosphate
  modified_base 12: mod_base = OTHER; note = 2'-O-methylcytidine-3'-phosphate
  modified_base 13: mod_base = OTHER; note = 2'-O-methyladenosine-3'-phosphate
  modified_base 14: mod_base = OTHER; note = 2'-fluorocytidine-3'-phosphate
  modified_base 15: mod_base = OTHER; note = 2'-O-methyluridine-3'-phosphate
  modified_base 16: mod_base = OTHER; note = 2'-fluorocytidine-3'-phosphate
  modified_base 17: mod_base = OTHER; note = 2'-O-methyluridine-3'-phosphate
  modified_base 18: mod_base = OTHER; note = 2'-O-methylcytidine-3'-phosphate
  modified_base 19: mod_base = OTHER; note = 2'-O-methyladenosine-3'-phosphate
  modified_base 20: mod_base = OTHER; note = 2'-O-methyladenosine-3'-phosphate
  modified_base 21: mod_base = OTHER; note = 2'-O-methylcytidine-3'- phosphorothioate
  modified_base 22: mod_base = OTHER; note = 2'-O-methylcytidine-3'- phosphorothioate
  modified_base 23: mod_base = OTHER; note = 2'-O-methyladenosine-3'-phosphate
tacctcataagcactctcaacca

SEQ ID NO: 3934 - RNA, 23 nt, synthetic construct
  misc_feature 1..23: note = Description of Artificial Sequence: Synthetic oligonucleotide
  source 1..23: mol_type = other RNA
  modified_base 1: mod_base = OTHER; note = 2'-O-methyluridine-3'-phosphorothioate
  modified_base 2: mod_base = OTHER; note = 2'-fluoroadenosine-3'-phosphorothioate
  modified_base 3: mod_base = OTHER; note = 2'-O-methyladenosine-3'-phosphate
  modified_base 4: mod_base = OTHER; note = 2'-O-methyluridine-3'-phosphate
  modified_base 5: mod_base = OTHER; note = 2'-O-methylcytidine-3'-phosphate
  modified_base 6: mod_base = OTHER; note = 2'-fluorocytidine-3'-phosphate
  modified_base 7: mod_base = OTHER; note = 2'-O-methyluridine-3'-phosphate
  modified_base 8: mod_base = OTHER; note = 2'-fluoroguanosine-3'-phosphate
  modified_base 9: mod_base = OTHER; note = 2'-fluorouridine-3'-phosphate
  modified_base 10: mod_base = OTHER; note = 2'-O-methyluridine-3'-phosphate
  modified_base 11: mod_base = OTHER; note = 2'-O-methylguanosine-3'-phosphate
  modified_base 12: mod_base = OTHER; note = 2'-O-methyluridine-3'-phosphate
  modified_base 13: mod_base = OTHER; note = 2'-O-methyladenosine-3'-phosphate
  modified_base 14: mod_base = OTHER; note = 2'-fluoroguanosine-3'-phosphate
  modified_base 15: mod_base = OTHER; note = 2'-O-methylcytidine-3'-phosphate
  modified_base 16: mod_base = OTHER; note = 2'-fluorocytidine-3'-phosphate
  modified_base 17: mod_base = OTHER; note = 2'-O-methyluridine-3'-phosphate
  modified_base 18: mod_base = OTHER; note = 2'-O-methyladenosine-3'-phosphate
  modified_base 19: mod_base = OTHER; note = 2'-O-methylguanosine-3'-phosphate
  modified_base 20: mod_base = OTHER; note = 2'-O-methyladenosine-3'-phosphate
  modified_base 21: mod_base = OTHER; note = 2'-O-methylcytidine-3'- phosphorothioate
  modified_base 22: mod_base = OTHER; note = 2'-O-methyladenosine-3'- phosphorothioate
  modified_base 23: mod_base = OTHER; note = 2'-O-methylguanosine-3'-phosphate
taatcctgttgtagcctagacag

SEQ ID NO: 3935 - RNA, 23 nt, synthetic construct
  misc_feature 1..23: note = Description of Artificial Sequence: Synthetic oligonucleotide
  source 1..23: mol_type = other RNA
  modified_base 1: mod_base = OTHER; note = 2'-O-methyladenosine-3'- phosphorothioate
  modified_base 2: mod_base = OTHER; note = 2'-fluoroguanosine-3'-phosphorothioate
  modified_base 3: mod_base = OTHER; note = 2'-O-methyladenosine-3'-phosphate
  modified_base 4: mod_base = OTHER; note = 2'-O-methyladenosine-3'-phosphate
  modified_base 5: mod_base = OTHER; note = 2'-O-methyluridine-3'-phosphate
  modified_base 6: mod_base = OTHER; note = 2'-fluorocytidine-3'-phosphate
  modified_base 7: mod_base = OTHER; note = 2'-O-methylcytidine-3'-phosphate
  modified_base 8: mod_base = OTHER; note = 2'-fluorouridine-3'-phosphate
  modified_base 9: mod_base = OTHER; note = 2'-fluoroguanosine-3'-phosphate
  modified_base 10: mod_base = OTHER; note = 2'-O-methyluridine-3'-phosphate
  modified_base 11: mod_base = OTHER; note = 2'-O-methyluridine-3'-phosphate
  modified_base 12: mod_base = OTHER; note = 2'-O-methylguanosine-3'-phosphate
  modified_base 13: mod_base = OTHER; note = 2'-O-methyluridine-3'-phosphate
  modified_base 14: mod_base = OTHER; note = 2'-fluoroadenosine-3'-phosphate
  modified_base 15: mod_base = OTHER; note = 2'-O-methylguanosine-3'-phosphate
  modified_base 16: mod_base = OTHER; note = 2'-fluorocytidine-3'-phosphate
  modified_base 17: mod_base = OTHER; note = 2'-O-methylcytidine-3'-phosphate
  modified_base 18: mod_base = OTHER; note = 2'-O-methyluridine-3'-phosphate
  modified_base 19: mod_base = OTHER; note = 2'-O-methyladenosine-3'-phosphate
  modified_base 20: mod_base = OTHER; note = 2'-O-methylguanosine-3'-phosphate
  modified_base 21: mod_base = OTHER; note = 2'-O-methyladenosine-3'- phosphorothioate
  modified_base 22: mod_base = OTHER; note = 2'-O-methylcytidine-3'- phosphorothioate
  modified_base 23: mod_base = OTHER; note = 2'-O-methyladenosine-3'-phosphate
agaatcctgttgtagcctagaca

SEQ ID NO: 3936 - RNA, 23 nt, synthetic construct
  misc_feature 1..23: note = Description of Artificial Sequence: Synthetic oligonucleotide
  source 1..23: mol_type = other RNA
  modified_base 1: mod_base = OTHER; note = 2'-O-methyluridine-3'-phosphorothioate
  modified_base 2: mod_base = OTHER; note = 2'-fluoroadenosine-3'-phosphorothioate
  modified_base 3: mod_base = OTHER; note = 2'-O-methylcytidine-3'-phosphate
  modified_base 4: mod_base = OTHER; note = 2'-O-methyladenosine-3'-phosphate
  modified_base 5: mod_base = OTHER; note = 2'-O-methyladenosine-3'-phosphate
  modified_base 6: mod_base = OTHER; note = 2'-fluorocytidine-3'-phosphate
  modified_base 7: mod_base = OTHER; note = 2'-O-methyladenosine-3'-phosphate
  modified_base 8: mod_base = OTHER; note = 2'-fluorouridine-3'-phosphate
  modified_base 9: mod_base = OTHER; note = 2'-fluoroguanosine-3'-phosphate
  modified_base 10: mod_base = OTHER; note = 2'-O-methylcytidine-3'-phosphate
  modified_base 11: mod_base = OTHER; note = 2'-O-methyladenosine-3'-phosphate
  modified_base 12: mod_base = OTHER; note = 2'-O-methylcytidine-3'-phosphate
  modified_base 13: mod_base = OTHER; note = 2'-O-methyladenosine-3'-phosphate
  modified_base 14: mod_base = OTHER; note = 2'-fluoroadenosine-3'-phosphate
  modified_base 15: mod_base = OTHER; note = 2'-O-methylcytidine-3'-phosphate
  modified_base 16: mod_base = OTHER; note = 2'-fluorocytidine-3'-phosphate
  modified_base 17: mod_base = OTHER; note = 2'-O-methyluridine-3'-phosphate
  modified_base 18: mod_base = OTHER; note = 2'-O-methylcytidine-3'-phosphate
  modified_base 19: mod_base = OTHER; note = 2'-O-methylcytidine-3'-phosphate
  modified_base 20: mod_base = OTHER; note = 2'-O-methyladenosine-3'-phosphate
  modified_base 21: mod_base = OTHER; note = 2'-O-methylcytidine-3'- phosphorothioate
  modified_base 22: mod_base = OTHER; note = 2'-O-methylcytidine-3'- phosphorothioate
  modified_base 23: mod_base = OTHER; note = 2'-O-methyluridine-3'-phosphate
tacaacatgcacaacctccacct

SEQ ID NO: 3937 - RNA, 23 nt, synthetic construct
  misc_feature 1..23: note = Description of Artificial Sequence: Synthetic oligonucleotide
  source 1..23: mol_type = other RNA
  modified_base 1: mod_base = OTHER; note = 2'-O-methyluridine-3'-phosphorothioate
  modified_base 2: mod_base = OTHER; note = 2'-fluorocytidine-3'-phosphorothioate
  modified_base 3: mod_base = OTHER; note = 2'-O-methyluridine-3'-phosphate
  modified_base 4: mod_base = OTHER; note = 2'-O-methyluridine-3'-phosphate
  modified_base 5: mod_base = OTHER; note = 2'-O-methyluridine-3'-phosphate
  modified_base 6: mod_base = OTHER; note = 2'-fluoroguanosine-3'-phosphate
  modified_base 7: mod_base = OTHER; note = 2'-O-methyladenosine-3'-phosphate
  modified_base 8: mod_base = OTHER; note = 2'-fluoroguanosine-3'-phosphate
  modified_base 9: mod_base = OTHER; note = 2'-fluorouridine-3'-phosphate
  modified_base 10: mod_base = OTHER; note = 2'-O-methyluridine-3'-phosphate
  modified_base 11: mod_base = OTHER; note = 2'-O-methyluridine-3'-phosphate
  modified_base 12: mod_base = OTHER; note = 2'-O-methylguanosine-3'-phosphate
  modified_base 13: mod_base = OTHER; note = 2'-O-methyladenosine-3'-phosphate
  modified_base 14: mod_base = OTHER; note = 2'-fluorouridine-3'-phosphate
  modified_base 15: mod_base = OTHER; note = 2'-O-methylcytidine-3'-phosphate
  modified_base 16: mod_base = OTHER; note = 2'-fluoroadenosine-3'-phosphate
  modified_base 17: mod_base = OTHER; note = 2'-O-methylcytidine-3'-phosphate
  modified_base 18: mod_base = OTHER; note = 2'-O-methylcytidine-3'-phosphate
  modified_base 19: mod_base = OTHER; note = 2'-O-methyluridine-3'-phosphate
  modified_base 20: mod_base = OTHER; note = 2'-O-methylcytidine-3'-phosphate
  modified_base 21: mod_base = OTHER; note = 2'-O-methyladenosine-3'- phosphorothioate
  modified_base 22: mod_base = OTHER; note = 2'-O-methyluridine-3'-phosphorothioate
  modified_base 23: mod_base = OTHER; note = 2'-O-methyladenosine-3'-phosphate
tctttgagtttgatcacctcata

SEQ ID NO: 3938 - RNA, 23 nt, synthetic construct
  misc_feature 1..23: note = Description of Artificial Sequence: Synthetic oligonucleotide
  source 1..23: mol_type = other RNA
  modified_base 1: mod_base = OTHER; note = 2'-O-methyluridine-3'-phosphorothioate
  modified_base 2: mod_base = OTHER; note = 2'-fluorouridine -3'-phosphorothioate
  modified_base 3: mod_base = OTHER; note = 2'-O-methyladenosine-3'-phosphate
  modified_base 4: mod_base = OTHER; note = 2'-O-methylguanosine-3'-phosphate
  modified_base 5: mod_base = OTHER; note = 2'-O-methylcytidine-3'-phosphate
  modified_base 6: mod_base = OTHER; note = 2'-fluorocytidine-3'-phosphate
  modified_base 7: mod_base = OTHER; note = 2'-O-methyluridine-3'-phosphate
  modified_base 8: mod_base = OTHER; note = 2'-fluorouridine-3'-phosphate
  modified_base 9: mod_base = OTHER; note = 2'-fluorouridine-3'-phosphate
  modified_base 10: mod_base = OTHER; note = 2'-O-methylguanosine-3'-phosphate
  modified_base 11: mod_base = OTHER; note = 2'-O-methyladenosine-3'-phosphate
  modified_base 12: mod_base = OTHER; note = 2'-O-methylguanosine-3'-phosphate
  modified_base 13: mod_base = OTHER; note = 2'-O-methyluridine-3'-phosphate
  modified_base 14: mod_base = OTHER; note = 2'-fluorouridine-3'-phosphate
  modified_base 15: mod_base = OTHER; note = 2'-O-methyluridine-3'-phosphate
  modified_base 16: mod_base = OTHER; note = 2'-fluoroguanosine-3'-phosphate
  modified_base 17: mod_base = OTHER; note = 2'-O-methyladenosine-3'-phosphate
  modified_base 18: mod_base = OTHER; note = 2'-O-methyluridine-3'-phosphate
  modified_base 19: mod_base = OTHER; note = 2'-O-methylcytidine-3'-phosphate
  modified_base 20: mod_base = OTHER; note = 2'-O-methyladenosine-3'-phosphate
  modified_base 21: mod_base = OTHER; note = 2'-O-methylcytidine-3'- phosphorothioate
  modified_base 22: mod_base = OTHER; note = 2'-O-methylcytidine-3'- phosphorothioate
  modified_base 23: mod_base = OTHER; note = 2'-O-methyluridine-3'-phosphate
ttagcctttgagtttgatcacct

SEQ ID NO: 3939 - RNA, 23 nt, synthetic construct
  misc_feature 1..23: note = Description of Artificial Sequence: Synthetic oligonucleotide
  source 1..23: mol_type = other RNA
  modified_base 1: mod_base = OTHER; note = 2'-O-methyluridine-3'-phosphorothioate
  modified_base 2: mod_base = OTHER; note = 2'-fluorouridine -3'-phosphorothioate
  modified_base 3: mod_base = OTHER; note = 2'-O-methylcytidine-3'-phosphate
  modified_base 4: mod_base = OTHER; note = 2'-O-methyladenosine-3'-phosphate
  modified_base 5: mod_base = OTHER; note = 2'-O-methyladenosine-3'-phosphate
  modified_base 6: mod_base = OTHER; note = 2'-fluoroadenosine-3'-phosphate
  modified_base 7: mod_base = OTHER; note = 2'-O-methylcytidine-3'-phosphate
  modified_base 8: mod_base = OTHER; note = 2'-fluoroguanosine-3'-phosphate
  modified_base 9: mod_base = OTHER; note = 2'-fluoroguanosine-3'-phosphate
  modified_base 10: mod_base = OTHER; note = 2'-O-methylguanosine-3'-phosphate
  modified_base 11: mod_base = OTHER; note = 2'-O-methylcytidine-3'-phosphate
  modified_base 12: mod_base = OTHER; note = 2'-O-methylcytidine-3'-phosphate
  modified_base 13: mod_base = OTHER; note = 2'-O-methyluridine-3'-phosphate
  modified_base 14: mod_base = OTHER; note = 2'-fluorocytidine-3'-phosphate
  modified_base 15: mod_base = OTHER; note = 2'-O-methyluridine-3'-phosphate
  modified_base 16: mod_base = OTHER; note = 2'-fluorouridine-3'-phosphate
  modified_base 17: mod_base = OTHER; note = 2'-O-methylcytidine-3'-phosphate
  modified_base 18: mod_base = OTHER; note = 2'-O-methylcytidine-3'-phosphate
  modified_base 19: mod_base = OTHER; note = 2'-O-methyluridine-3'-phosphate
  modified_base 20: mod_base = OTHER; note = 2'-O-methylcytidine-3'-phosphate
  modified_base 21: mod_base = OTHER; note = 2'-O-methyladenosine-3'- phosphorothioate
  modified_base 22: mod_base = OTHER; note = 2'-O-methylguanosine-3'- phosphorothioate
  modified_base 23: mod_base = OTHER; note = 2'-O-methyladenosine-3'-phosphate
ttcaaacgggcctcttcctcaga

SEQ ID NO: 3940 - RNA, 23 nt, synthetic construct
  misc_feature 1..23: note = Description of Artificial Sequence: Synthetic oligonucleotide
  source 1..23: mol_type = other RNA
  modified_base 1: mod_base = OTHER; note = 2'-O-methyluridine-3'-phosphorothioate
  modified_base 2: mod_base = OTHER; note = 2'-fluoroadenosine-3'-phosphorothioate
  modified_base 3: mod_base = OTHER; note = 2'-O-methylcytidine-3'-phosphate
  modified_base 4: mod_base = OTHER; note = 2'-O-methyluridine-3'-phosphate
  modified_base 5: mod_base = OTHER; note = 2'-O-methylcytidine-3'-phosphate
  modified_base 6: mod_base = OTHER; note = 2'-fluorouridine-3'-phosphate
  modified_base 7: mod_base = OTHER; note = 2'-O-methylcytidine-3'-phosphate
  modified_base 8: mod_base = OTHER; note = 2'-fluoroadenosine-3'-phosphate
  modified_base 9: mod_base = OTHER; note = 2'-fluoroadenosine-3'-phosphate
  modified_base 10: mod_base = OTHER; note = 2'-O-methylcytidine-3'-phosphate
  modified_base 11: mod_base = OTHER; note = 2'-O-methylcytidine-3'-phosphate
  modified_base 12: mod_base = OTHER; note = 2'-O-methyladenosine-3'-phosphate
  modified_base 13: mod_base = OTHER; note = 2'-O-methylcytidine-3'-phosphate
  modified_base 14: mod_base = OTHER; note = 2'-fluorocytidine-3'-phosphate
  modified_base 15: mod_base = OTHER; note = 2'-O-methyluridine-3'-phosphate
  modified_base 16: mod_base = OTHER; note = 2'-fluoroguanosine-3'-phosphate
  modified_base 17: mod_base = OTHER; note = 2'-O-methylcytidine-3'-phosphate
  modified_base 18: mod_base = OTHER; note = 2'-O-methyluridine-3'-phosphate
  modified_base 19: mod_base = OTHER; note = 2'-O-methyluridine-3'-phosphate
  modified_base 20: mod_base = OTHER; note = 2'-O-methylguanosine-3'-phosphate
  modified_base 21: mod_base = OTHER; note = 2'-O-methyluridine-3'-phosphorothioate
  modified_base 22: mod_base = OTHER; note = 2'-O-methylguanosine-3'- phosphorothioate
  modified_base 23: mod_base = OTHER; note = 2'-O-methyladenosine-3'-phosphate
tactctcaaccacctgcttgtga

SEQ ID NO: 3941 - RNA, 23 nt, synthetic construct
  misc_feature 1..23: note = Description of Artificial Sequence: Synthetic oligonucleotide
  source 1..23: mol_type = other RNA
  modified_base 1: mod_base = OTHER; note = 2'-O-methyluridine-3'-phosphorothioate
  modified_base 2: mod_base = OTHER; note = 2'-fluorouridine -3'-phosphorothioate
  modified_base 3: mod_base = OTHER; note = 2'-O-methyladenosine-3'-phosphate
  modified_base 4: mod_base = OTHER; note = 2'-O-methyluridine-3'-phosphate
  modified_base 5: mod_base = OTHER; note = 2'-O-methyladenosine-3'-phosphate
  modified_base 6: mod_base = OTHER; note = 2'-fluorocytidine-3'-phosphate
  modified_base 7: mod_base = OTHER; note = 2'-O-methyluridine-3'-phosphate
  modified_base 8: mod_base = OTHER; note = 2'-fluorocytidine-3'-phosphate
  modified_base 9: mod_base = OTHER; note = 2'-fluorouridine-3'-phosphate
  modified_base 10: mod_base = OTHER; note = 2'-O-methylcytidine-3'-phosphate
  modified_base 11: mod_base = OTHER; note = 2'-O-methyluridine-3'-phosphate
  modified_base 12: mod_base = OTHER; note = 2'-O-methylguanosine-3'-phosphate
  modified_base 13: mod_base = OTHER; note = 2'-O-methylcytidine-3'-phosphate
  modified_base 14: mod_base = OTHER; note = 2'-fluorocytidine-3'-phosphate
  modified_base 15: mod_base = OTHER; note = 2'-O-methyladenosine-3'-phosphate
  modified_base 16: mod_base = OTHER; note = 2'-fluoroadenosine-3'-phosphate
  modified_base 17: mod_base = OTHER; note = 2'-O-methyladenosine-3'-phosphate
  modified_base 18: mod_base = OTHER; note = 2'-O-methyluridine-3'-phosphate
  modified_base 19: mod_base = OTHER; note = 2'-O-methylcytidine-3'-phosphate
  modified_base 20: mod_base = OTHER; note = 2'-O-methyluridine-3'-phosphate
  modified_base 21: mod_base = OTHER; note = 2'-O-methylguanosine-3'- phosphorothioate
  modified_base 22: mod_base = OTHER; note = 2'-O-methylcytidine-3'- phosphorothioate
  modified_base 23: mod_base = OTHER; note = 2'-O-methyluridine-3'-phosphate
ttatactctctgccaaatctgct

SEQ ID NO: 3942 - RNA, 23 nt, synthetic construct
  misc_feature 1..23: note = Description of Artificial Sequence: Synthetic oligonucleotide
  source 1..23: mol_type = other RNA
  modified_base 1: mod_base = OTHER; note = 2'-O-methylguanosine-3'- phosphorothioate
  modified_base 2: mod_base = OTHER; note = 2'-fluorouridine -3'-phosphorothioate
  modified_base 3: mod_base = OTHER; note = 2'-O-methyluridine-3'-phosphate
  modified_base 4: mod_base = OTHER; note = 2'-O-methyluridine-3'-phosphate
  modified_base 5: mod_base = OTHER; note = 2'-O-methylguanosine-3'-phosphate
  modified_base 6: mod_base = OTHER; note = 2'-fluoroadenosine-3'-phosphate
  modified_base 7: mod_base = OTHER; note = 2'-O-methyluridine-3'-phosphate
  modified_base 8: mod_base = OTHER; note = 2'-fluorocytidine-3'-phosphate
  modified_base 9: mod_base = OTHER; note = 2'-fluoroadenosine-3'-phosphate
  modified_base 10: mod_base = OTHER; note = 2'-O-methylcytidine-3'-phosphate
  modified_base 11: mod_base = OTHER; note = 2'-O-methylcytidine-3'-phosphate
  modified_base 12: mod_base = OTHER; note = 2'-O-methyluridine-3'-phosphate
  modified_base 13: mod_base = OTHER; note = 2'-O-methylcytidine-3'-phosphate
  modified_base 14: mod_base = OTHER; note = 2'-fluoroadenosine-3'-phosphate
  modified_base 15: mod_base = OTHER; note = 2'-O-methyluridine-3'-phosphate
  modified_base 16: mod_base = OTHER; note = 2'-fluoroadenosine-3'-phosphate
  modified_base 17: mod_base = OTHER; note = 2'-O-methyladenosine-3'-phosphate
  modified_base 18: mod_base = OTHER; note = 2'-O-methylguanosine-3'-phosphate
  modified_base 19: mod_base = OTHER; note = 2'-O-methylcytidine-3'-phosphate
  modified_base 20: mod_base = OTHER; note = 2'-O-methyladenosine-3'-phosphate
  modified_base 21: mod_base = OTHER; note = 2'-O-methylcytidine-3'- phosphorothioate
  modified_base 22: mod_base = OTHER; note = 2'-O-methyluridine-3'-phosphorothioate
  modified_base 23: mod_base = OTHER; note = 2'-O-methylcytidine-3'-phosphate
gtttgatcacctcataagcactc

SEQ ID NO: 3943 - RNA, 23 nt, synthetic construct
  misc_feature 1..23: note = Description of Artificial Sequence: Synthetic oligonucleotide
  source 1..23: mol_type = other RNA
  modified_base 1: mod_base = OTHER; note = 2'-O-methyladenosine-3'- phosphorothioate
  modified_base 2: mod_base = OTHER; note = 2'-fluorouridine -3'-phosphorothioate
  modified_base 3: mod_base = OTHER; note = 2'-O-methyladenosine-3'-phosphate
  modified_base 4: mod_base = OTHER; note = 2'-O-methylcytidine-3'-phosphate
  modified_base 5: mod_base = OTHER; note = 2'-O-methyluridine-3'-phosphate
  modified_base 6: mod_base = OTHER; note = 2'-fluorocytidine-3'-phosphate
  modified_base 7: mod_base = OTHER; note = 2'-O-methyluridine-3'-phosphate
  modified_base 8: mod_base = OTHER; note = 2'-fluorocytidine-3'-phosphate
  modified_base 9: mod_base = OTHER; note = 2'-fluorouridine-3'-phosphate
  modified_base 10: mod_base = OTHER; note = 2'-O-methylguanosine-3'-phosphate
  modified_base 11: mod_base = OTHER; note = 2'-O-methylcytidine-3'-phosphate
  modified_base 12: mod_base = OTHER; note = 2'-O-methylcytidine-3'-phosphate
  modified_base 13: mod_base = OTHER; note = 2'-O-methyladenosine-3'-phosphate
  modified_base 14: mod_base = OTHER; note = 2'-fluoroadenosine-3'-phosphate
  modified_base 15: mod_base = OTHER; note = 2'-O-methyladenosine-3'-phosphate
  modified_base 16: mod_base = OTHER; note = 2'-fluorouridine-3'-phosphate
  modified_base 17: mod_base = OTHER; note = 2'-O-methylcytidine-3'-phosphate
  modified_base 18: mod_base = OTHER; note = 2'-O-methyluridine-3'-phosphate
  modified_base 19: mod_base = OTHER; note = 2'-O-methylguanosine-3'-phosphate
  modified_base 20: mod_base = OTHER; note = 2'-O-methylcytidine-3'-phosphate
  modified_base 21: mod_base = OTHER; note = 2'-O-methyluridine-3'-phosphorothioate
  modified_base 22: mod_base = OTHER; note = 2'-O-methyladenosine-3'- phosphorothioate
  modified_base 23: mod_base = OTHER; note = 2'-O-methylcytidine-3'-phosphate
atactctctgccaaatctgctac

SEQ ID NO: 3944 - RNA, 23 nt, synthetic construct
  misc_feature 1..23: note = Description of Artificial Sequence: Synthetic oligonucleotide
  source 1..23: mol_type = other RNA
  modified_base 1: mod_base = OTHER; note = 2'-O-methyluridine-3'-phosphorothioate
  modified_base 2: mod_base = OTHER; note = 2'-fluorocytidine-3'-phosphorothioate
  modified_base 3: mod_base = OTHER; note = 2'-O-methyladenosine-3'-phosphate
  modified_base 4: mod_base = OTHER; note = 2'-O-methyluridine-3'-phosphate
  modified_base 5: mod_base = OTHER; note = 2'-O-methyluridine-3'-phosphate
  modified_base 6: mod_base = OTHER; note = 2'-fluoroadenosine-3'-phosphate
  modified_base 7: mod_base = OTHER; note = 2'-O-methyluridine-3'-phosphate
  modified_base 8: mod_base = OTHER; note = 2'-fluoroadenosine-3'-phosphate
  modified_base 9: mod_base = OTHER; note = 2'-fluorocytidine-3'-phosphate
  modified_base 10: mod_base = OTHER; note = 2'-O-methyluridine-3'-phosphate
  modified_base 11: mod_base = OTHER; note = 2'-O-methylcytidine-3'-phosphate
  modified_base 12: mod_base = OTHER; note = 2'-O-methyluridine-3'-phosphate
  modified_base 13: mod_base = OTHER; note = 2'-O-methylcytidine-3'-phosphate
  modified_base 14: mod_base = OTHER; note = 2'-fluorouridine-3'-phosphate
  modified_base 15: mod_base = OTHER; note = 2'-O-methylguanosine-3'-phosphate
  modified_base 16: mod_base = OTHER; note = 2'-fluorocytidine-3'-phosphate
  modified_base 17: mod_base = OTHER; note = 2'-O-methylcytidine-3'-phosphate
  modified_base 18: mod_base = OTHER; note = 2'-O-methyladenosine-3'-phosphate
  modified_base 19: mod_base = OTHER; note = 2'-O-methyladenosine-3'-phosphate
  modified_base 20: mod_base = OTHER; note = 2'-O-methyladenosine-3'-phosphate
  modified_base 21: mod_base = OTHER; note = 2'-O-methyluridine-3'-phosphorothioate
  modified_base 22: mod_base = OTHER; note = 2'-O-methylcytidine-3'- phosphorothioate
  modified_base 23: mod_base = OTHER; note = 2'-O-methyluridine-3'-phosphate
tcattatactctctgccaaatct

SEQ ID NO: 3945 - RNA, 23 nt, synthetic construct
  misc_feature 1..23: note = Description of Artificial Sequence: Synthetic oligonucleotide
  source 1..23: mol_type = other RNA
  modified_base 1: mod_base = OTHER; note = 2'-O-methyluridine-3'-phosphorothioate
  modified_base 2: mod_base = OTHER; note = 2'-fluorouridine -3'-phosphorothioate
  modified_base 3: mod_base = OTHER; note = 2'-O-methylcytidine-3'-phosphate
  modified_base 4: mod_base = OTHER; note = 2'-O-methyladenosine-3'-phosphate
  modified_base 5: mod_base = OTHER; note = 2'-O-methyluridine-3'-phosphate
  modified_base 6: mod_base = OTHER; note = 2'-fluorouridine-3'-phosphate
  modified_base 7: mod_base = OTHER; note = 2'-O-methyladenosine-3'-phosphate
  modified_base 8: mod_base = OTHER; note = 2'-fluorouridine-3'-phosphate
  modified_base 9: mod_base = OTHER; note = 2'-fluoroadenosine-3'-phosphate
  modified_base 10: mod_base = OTHER; note = 2'-O-methylcytidine-3'-phosphate
  modified_base 11: mod_base = OTHER; note = 2'-O-methyluridine-3'-phosphate
  modified_base 12: mod_base = OTHER; note = 2'-O-methylcytidine-3'-phosphate
  modified_base 13: mod_base = OTHER; note = 2'-O-methyluridine-3'-phosphate
  modified_base 14: mod_base = OTHER; note = 2'-fluorocytidine-3'-phosphate
  modified_base 15: mod_base = OTHER; note = 2'-O-methyluridine-3'-phosphate
  modified_base 16: mod_base = OTHER; note = 2'-fluoroguanosine-3'-phosphate
  modified_base 17: mod_base = OTHER; note = 2'-O-methylcytidine-3'-phosphate
  modified_base 18: mod_base = OTHER; note = 2'-O-methylcytidine-3'-phosphate
  modified_base 19: mod_base = OTHER; note = 2'-O-methyladenosine-3'-phosphate
  modified_base 20: mod_base = OTHER; note = 2'-O-methyladenosine-3'-phosphate
  modified_base 21: mod_base = OTHER; note = 2'-O-methyladenosine-3'- phosphorothioate
  modified_base 22: mod_base = OTHER; note = 2'-O-methyluridine-3'-phosphorothioate
  modified_base 23: mod_base = OTHER; note = 2'-O-methylcytidine-3'-phosphate
ttcattatactctctgccaaatc

SEQ ID NO: 3946 - RNA, 23 nt, synthetic construct
  misc_feature 1..23: note = Description of Artificial Sequence: Synthetic oligonucleotide
  source 1..23: mol_type = other RNA
  modified_base 1: mod_base = OTHER; note = 2'-O-methyluridine-3'-phosphorothioate
  modified_base 2: mod_base = OTHER; note = 2'-fluoroadenosine-3'-phosphorothioate
  modified_base 3: mod_base = OTHER; note = 2'-O-methyluridine-3'-phosphate
  modified_base 4: mod_base = OTHER; note = 2'-O-methyluridine-3'-phosphate
  modified_base 5: mod_base = OTHER; note = 2'-O-methylcytidine-3'-phosphate
  modified_base 6: mod_base = OTHER; note = 2'-fluorouridine-3'-phosphate
  modified_base 7: mod_base = OTHER; note = 2'-O-methylguanosine-3'-phosphate
  modified_base 8: mod_base = OTHER; note = 2'-fluorouridine-3'-phosphate
  modified_base 9: mod_base = OTHER; note = 2'-fluorocytidine-3'-phosphate
  modified_base 10: mod_base = OTHER; note = 2'-O-methylcytidine-3'-phosphate
  modified_base 11: mod_base = OTHER; note = 2'-O-methylcytidine-3'-phosphate
  modified_base 12: mod_base = OTHER; note = 2'-O-methyladenosine-3'-phosphate
  modified_base 13: mod_base = OTHER; note = 2'-O-methyladenosine-3'-phosphate
  modified_base 14: mod_base = OTHER; note = 2'-fluoroadenosine-3'-phosphate
  modified_base 15: mod_base = OTHER; note = 2'-O-methyladenosine-3'-phosphate
  modified_base 16: mod_base = OTHER; note = 2'-fluorouridine-3'-phosphate
  modified_base 17: mod_base = OTHER; note = 2'-O-methylguanosine-3'-phosphate
  modified_base 18: mod_base = OTHER; note = 2'-O-methylcytidine-3'-phosphate
  modified_base 19: mod_base = OTHER; note = 2'-O-methyladenosine-3'-phosphate
  modified_base 20: mod_base = OTHER; note = 2'-O-methyladenosine-3'-phosphate
  modified_base 21: mod_base = OTHER; note = 2'-O-methylguanosine-3'- phosphorothioate
  modified_base 22: mod_base = OTHER; note = 2'-O-methylguanosine-3'- phosphorothioate
  modified_base 23: mod_base = OTHER; note = 2'-O-methyladenosine-3'-phosphate
tattctgtcccaaaatgcaagga

SEQ ID NO: 3947 - RNA, 23 nt, synthetic construct
  misc_feature 1..23: note = Description of Artificial Sequence: Synthetic oligonucleotide
  source 1..23: mol_type = other RNA
  modified_base 1: mod_base = OTHER; note = 2'-O-methyluridine-3'-phosphorothioate
  modified_base 2: mod_base = OTHER; note = 2'-fluorocytidine-3'-phosphorothioate
  modified_base 3: mod_base = OTHER; note = 2'-O-methyladenosine-3'-phosphate
  modified_base 4: mod_base = OTHER; note = 2'-O-methylcytidine-3'-phosphate
  modified_base 5: mod_base = OTHER; note = 2'-O-methyladenosine-3'-phosphate
  modified_base 6: mod_base = OTHER; note = 2'-fluoroadenosine-3'-phosphate
  modified_base 7: mod_base = OTHER; note = 2'-O-methylguanosine-3'-phosphate
  modified_base 8: mod_base = OTHER; note = 2'-fluoroguanosine-3'-phosphate
  modified_base 9: mod_base = OTHER; note = 2'-fluorouridine-3'-phosphate
  modified_base 10: mod_base = OTHER; note = 2'-O-methylcytidine-3'-phosphate
  modified_base 11: mod_base = OTHER; note = 2'-O-methyluridine-3'-phosphate
  modified_base 12: mod_base = OTHER; note = 2'-O-methylguanosine-3'-phosphate
  modified_base 13: mod_base = OTHER; note = 2'-O-methyladenosine-3'-phosphate
  modified_base 14: mod_base = OTHER; note = 2'-fluoroguanosine-3'-phosphate
  modified_base 15: mod_base = OTHER; note = 2'-O-methyladenosine-3'-phosphate
  modified_base 16: mod_base = OTHER; note = 2'-fluorouridine-3'-phosphate
  modified_base 17: mod_base = OTHER; note = 2'-O-methyluridine-3'-phosphate
  modified_base 18: mod_base = OTHER; note = 2'-O-methylcytidine-3'-phosphate
  modified_base 19: mod_base = OTHER; note = 2'-O-methylcytidine-3'-phosphate
  modified_base 20: mod_base = OTHER; note = 2'-O-methyladenosine-3'-phosphate
  modified_base 21: mod_base = OTHER; note = 2'-O-methyluridine-3'-phosphorothioate
  modified_base 22: mod_base = OTHER; note = 2'-O-methyluridine-3'-phosphorothioate
  modified_base 23: mod_base = OTHER; note = 2'-O-methylcytidine-3'-phosphate
tcacaaggtctgagattccattc

SEQ ID NO: 3948 - RNA, 23 nt, synthetic construct
  misc_feature 1..23: note = Description of Artificial Sequence: Synthetic oligonucleotide
  source 1..23: mol_type = other RNA
  modified_base 1: mod_base = OTHER; note = 2'-O-methyluridine-3'-phosphorothioate
  modified_base 2: mod_base = OTHER; note = 2'-fluoroadenosine-3'-phosphorothioate
  modified_base 3: mod_base = OTHER; note = 2'-O-methylguanosine-3'-phosphate
  modified_base 4: mod_base = OTHER; note = 2'-O-methylcytidine-3'-phosphate
  modified_base 5: mod_base = OTHER; note = 2'-O-methyladenosine-3'-phosphate
  modified_base 6: mod_base = OTHER; note = 2'-fluorouridine-3'-phosphate
  modified_base 7: mod_base = OTHER; note = 2'-O-methylcytidine-3'-phosphate
  modified_base 8: mod_base = OTHER; note = 2'-fluoroadenosine-3'-phosphate
  modified_base 9: mod_base = OTHER; note = 2'-fluoroguanosine-3'-phosphate
  modified_base 10: mod_base = OTHER; note = 2'-O-methylguanosine-3'-phosphate
  modified_base 11: mod_base = OTHER; note = 2'-O-methyladenosine-3'-phosphate
  modified_base 12: mod_base = OTHER; note = 2'-O-methyluridine-3'-phosphate
  modified_base 13: mod_base = OTHER; note = 2'-O-methyladenosine-3'-phosphate
  modified_base 14: mod_base = OTHER; note = 2'-fluorouridine-3'-phosphate
  modified_base 15: mod_base = OTHER; note = 2'-O-methyladenosine-3'-phosphate
  modified_base 16: mod_base = OTHER; note = 2'-fluoroguanosine-3'-phosphate
  modified_base 17: mod_base = OTHER; note = 2'-O-methylcytidine-3'-phosphate
  modified_base 18: mod_base = OTHER; note = 2'-O-methyluridine-3'-phosphate
  modified_base 19: mod_base = OTHER; note = 2'-O-methylguanosine-3'-phosphate
  modified_base 20: mod_base = OTHER; note = 2'-O-methyluridine-3'-phosphate
  modified_base 21: mod_base = OTHER; note = 2'-O-methylguanosine-3'- phosphorothioate
  modified_base 22: mod_base = OTHER; note = 2'-O-methylguanosine-3'- phosphorothioate
  modified_base 23: mod_base = OTHER; note = 2'-O-methyladenosine-3'-phosphate
tagcatcaggatatagctgtgga

SEQ ID NO: 3949 - RNA, 23 nt, synthetic construct
  misc_feature 1..23: note = Description of Artificial Sequence: Synthetic oligonucleotide
  source 1..23: mol_type = other RNA
  modified_base 1: mod_base = OTHER; note = 2'-O-methyluridine-3'-phosphorothioate
  modified_base 2: mod_base = OTHER; note = 2'-fluorouridine -3'-phosphorothioate
  modified_base 3: mod_base = OTHER; note = 2'-O-methyluridine-3'-phosphate
  modified_base 4: mod_base = OTHER; note = 2'-O-methylcytidine-3'-phosphate
  modified_base 5: mod_base = OTHER; note = 2'-O-methyladenosine-3'-phosphate
  modified_base 6: mod_base = OTHER; note = 2'-fluoroadenosine-3'-phosphate
  modified_base 7: mod_base = OTHER; note = 2'-O-methyladenosine-3'-phosphate
  modified_base 8: mod_base = OTHER; note = 2'-fluorocytidine-3'-phosphate
  modified_base 9: mod_base = OTHER; note = 2'-fluoroguanosine-3'-phosphate
  modified_base 10: mod_base = OTHER; note = 2'-O-methylguanosine-3'-phosphate
  modified_base 11: mod_base = OTHER; note = 2'-O-methylguanosine-3'-phosphate
  modified_base 12: mod_base = OTHER; note = 2'-O-methylcytidine-3'-phosphate
  modified_base 13: mod_base = OTHER; note = 2'-O-methylcytidine-3'-phosphate
  modified_base 14: mod_base = OTHER; note = 2'-fluorouridine-3'-phosphate
  modified_base 15: mod_base = OTHER; note = 2'-O-methylcytidine-3'-phosphate
  modified_base 16: mod_base = OTHER; note = 2'-fluorouridine-3'-phosphate
  modified_base 17: mod_base = OTHER; note = 2'-O-methyluridine-3'-phosphate
  modified_base 18: mod_base = OTHER; note = 2'-O-methylcytidine-3'-phosphate
  modified_base 19: mod_base = OTHER; note = 2'-O-methylcytidine-3'-phosphate
  modified_base 20: mod_base = OTHER; note = 2'-O-methyluridine-3'-phosphate
  modified_base 21: mod_base = OTHER; note = 2'-O-methylcytidine-3'- phosphorothioate
  modified_base 22: mod_base = OTHER; note = 2'-O-methyladenosine-3'- phosphorothioate
  modified_base 23: mod_base = OTHER; note = 2'-O-methylguanosine-3'-phosphate
tttcaaacgggcctcttcctcag

SEQ ID NO: 3950 - RNA, 23 nt, synthetic construct
  misc_feature 1..23: note = Description of Artificial Sequence: Synthetic oligonucleotide
  source 1..23: mol_type = other RNA
  modified_base 1: mod_base = OTHER; note = 2'-O-methyluridine-3'-phosphorothioate
  modified_base 2: mod_base = OTHER; note = 2'-fluoroadenosine-3'-phosphorothioate
  modified_base 3: mod_base = OTHER; note = 2'-O-methyladenosine-3'-phosphate
  modified_base 4: mod_base = OTHER; note = 2'-O-methyladenosine-3'-phosphate
  modified_base 5: mod_base = OTHER; note = 2'-O-methylcytidine-3'-phosphate
  modified_base 6: mod_base = OTHER; note = 2'-fluoroguanosine-3'-phosphate
  modified_base 7: mod_base = OTHER; note = 2'-O-methylguanosine-3'-phosphate
  modified_base 8: mod_base = OTHER; note = 2'-fluoroguanosine-3'-phosphate
  modified_base 9: mod_base = OTHER; note = 2'-fluorocytidine-3'-phosphate
  modified_base 10: mod_base = OTHER; note = 2'-O-methylcytidine-3'-phosphate
  modified_base 11: mod_base = OTHER; note = 2'-O-methyluridine-3'-phosphate
  modified_base 12: mod_base = OTHER; note = 2'-O-methylcytidine-3'-phosphate
  modified_base 13: mod_base = OTHER; note = 2'-O-methyluridine-3'-phosphate
  modified_base 14: mod_base = OTHER; note = 2'-fluorouridine-3'-phosphate
  modified_base 15: mod_base = OTHER; note = 2'-O-methylcytidine-3'-phosphate
  modified_base 16: mod_base = OTHER; note = 2'-fluorocytidine-3'-phosphate
  modified_base 17: mod_base = OTHER; note = 2'-O-methyluridine-3'-phosphate
  modified_base 18: mod_base = OTHER; note = 2'-O-methylcytidine-3'-phosphate
  modified_base 19: mod_base = OTHER; note = 2'-O-methyladenosine-3'-phosphate
  modified_base 20: mod_base = OTHER; note = 2'-O-methylguanosine-3'-phosphate
  modified_base 21: mod_base = OTHER; note = 2'-O-methyladenosine-3'- phosphorothioate
  modified_base 22: mod_base = OTHER; note = 2'-O-methyladenosine-3'- phosphorothioate
  modified_base 23: mod_base = OTHER; note = 2'-O-methylguanosine-3'-phosphate
taaacgggcctcttcctcagaag

SEQ ID NO: 3951 - RNA, 23 nt, synthetic construct
  misc_feature 1..23: note = Description of Artificial Sequence: Synthetic oligonucleotide
  source 1..23: mol_type = other RNA
  modified_base 1: mod_base = OTHER; note = 2'-O-methyluridine-3'-phosphorothioate
  modified_base 2: mod_base = OTHER; note = 2'-fluoroadenosine-3'-phosphorothioate
  modified_base 3: mod_base = OTHER; note = 2'-O-methylcytidine-3'-phosphate
  modified_base 4: mod_base = OTHER; note = 2'-O-methyladenosine-3'-phosphate
  modified_base 5: mod_base = OTHER; note = 2'-O-methylcytidine-3'-phosphate
  modified_base 6: mod_base = OTHER; note = 2'-fluorouridine-3'-phosphate
  modified_base 7: mod_base = OTHER; note = 2'-O-methylguanosine-3'-phosphate
  modified_base 8: mod_base = OTHER; note = 2'-fluoroguanosine-3'-phosphate
  modified_base 9: mod_base = OTHER; note = 2'-fluoroadenosine-3'-phosphate
  modified_base 10: mod_base = OTHER; note = 2'-O-methyluridine-3'-phosphate
  modified_base 11: mod_base = OTHER; note = 2'-O-methylcytidine-3'-phosphate
  modified_base 12: mod_base = OTHER; note = 2'-O-methylcytidine-3'-phosphate
  modified_base 13: mod_base = OTHER; note = 2'-O-methylcytidine-3'-phosphate
  modified_base 14: mod_base = OTHER; note = 2'-fluoroadenosine-3'-phosphate
  modified_base 15: mod_base = OTHER; note = 2'-O-methylguanosine-3'-phosphate
  modified_base 16: mod_base = OTHER; note = 2'-fluoroguanosine-3'-phosphate
  modified_base 17: mod_base = OTHER; note = 2'-O-methyladenosine-3'-phosphate
  modified_base 18: mod_base = OTHER; note = 2'-O-methyluridine-3'-phosphate
  modified_base 19: mod_base = OTHER; note = 2'-O-methylguanosine-3'-phosphate
  modified_base 20: mod_base = OTHER; note = 2'-O-methyluridine-3'-phosphate
  modified_base 21: mod_base = OTHER; note = 2'-O-methylguanosine-3'- phosphorothioate
  modified_base 22: mod_base = OTHER; note = 2'-O-methyladenosine-3'- phosphorothioate
  modified_base 23: mod_base = OTHER; note = 2'-O-methylcytidine-3'-phosphate
tacactggatcccaggatgtgac

SEQ ID NO: 3952 - RNA, 23 nt, synthetic construct
  misc_feature 1..23: note = Description of Artificial Sequence: Synthetic oligonucleotide
  source 1..23: mol_type = other RNA
  modified_base 1: mod_base = OTHER; note = 2'-O-methyluridine-3'-phosphorothioate
  modified_base 2: mod_base = OTHER; note = 2'-fluoroguanosine-3'-phosphorothioate
  modified_base 3: mod_base = OTHER; note = 2'-O-methylguanosine-3'-phosphate
  modified_base 4: mod_base = OTHER; note = 2'-O-methyluridine-3'-phosphate
  modified_base 5: mod_base = OTHER; note = 2'-O-methylguanosine-3'-phosphate
  modified_base 6: mod_base = OTHER; note = 2'-fluorouridine-3'-phosphate
  modified_base 7: mod_base = OTHER; note = 2'-O-methyluridine-3'-phosphate
  modified_base 8: mod_base = OTHER; note = 2'-fluorocytidine-3'-phosphate
  modified_base 9: mod_base = OTHER; note = 2'-fluorouridine-3'-phosphate
  modified_base 10: mod_base = OTHER; note = 2'-O-methyladenosine-3'-phosphate
  modified_base 11: mod_base = OTHER; note = 2'-O-methyladenosine-3'-phosphate
  modified_base 12: mod_base = OTHER; note = 2'-O-methylguanosine-3'-phosphate
  modified_base 13: mod_base = OTHER; note = 2'-O-methylguanosine-3'-phosphate
  modified_base 14: mod_base = OTHER; note = 2'-fluoroadenosine-3'-phosphate
  modified_base 15: mod_base = OTHER; note = 2'-O-methyladenosine-3'-phosphate
  modified_base 16: mod_base = OTHER; note = 2'-fluoroadenosine-3'-phosphate
  modified_base 17: mod_base = OTHER; note = 2'-O-methyladenosine-3'-phosphate
  modified_base 18: mod_base = OTHER; note = 2'-O-methylguanosine-3'-phosphate
  modified_base 19: mod_base = OTHER; note = 2'-O-methylguanosine-3'-phosphate
  modified_base 20: mod_base = OTHER; note = 2'-O-methylcytidine-3'-phosphate
  modified_base 21: mod_base = OTHER; note = 2'-O-methyluridine-3'-phosphorothioate
  modified_base 22: mod_base = OTHER; note = 2'-O-methylguanosine-3'- phosphorothioate
  modified_base 23: mod_base = OTHER; note = 2'-O-methylcytidine-3'-phosphate
tggtgttctaaggaaaaggctgc

SEQ ID NO: 3953 - RNA, 23 nt, synthetic construct
  misc_feature 1..23: note = Description of Artificial Sequence: Synthetic oligonucleotide
  source 1..23: mol_type = other RNA
  modified_base 1: mod_base = OTHER; note = 2'-O-methyluridine-3'-phosphorothioate
  modified_base 2: mod_base = OTHER; note = 2'-fluoroadenosine-3'-phosphorothioate
  modified_base 3: mod_base = OTHER; note = 2'-O-methyluridine-3'-phosphate
  modified_base 4: mod_base = OTHER; note = 2'-O-methyluridine-3'-phosphate
  modified_base 5: mod_base = OTHER; note = 2'-O-methyluridine-3'-phosphate
  modified_base 6: mod_base = OTHER; note = 2'-fluorocytidine-3'-phosphate
  modified_base 7: mod_base = OTHER; note = 2'-O-methyladenosine-3'-phosphate
  modified_base 8: mod_base = OTHER; note = 2'-fluorocytidine-3'-phosphate
  modified_base 9: mod_base = OTHER; note = 2'-fluoroadenosine-3'-phosphate
  modified_base 10: mod_base = OTHER; note = 2'-O-methylcytidine-3'-phosphate
  modified_base 11: mod_base = OTHER; note = 2'-O-methyluridine-3'-phosphate
  modified_base 12: mod_base = OTHER; note = 2'-O-methyladenosine-3'-phosphate
  modified_base 13: mod_base = OTHER; note = 2'-O-methyladenosine-3'-phosphate
  modified_base 14: mod_base = OTHER; note = 2'-fluorocytidine-3'-phosphate
  modified_base 15: mod_base = OTHER; note = 2'-O-methylcytidine-3'-phosphate
  modified_base 16: mod_base = OTHER; note = 2'-fluoroadenosine-3'-phosphate
  modified_base 17: mod_base = OTHER; note = 2'-O-methylguanosine-3'-phosphate
  modified_base 18: mod_base = OTHER; note = 2'-O-methyluridine-3'-phosphate
  modified_base 19: mod_base = OTHER; note = 2'-O-methyluridine-3'-phosphate
  modified_base 20: mod_base = OTHER; note = 2'-O-methylguanosine-3'-phosphate
  modified_base 21: mod_base = OTHER; note = 2'-O-methyladenosine-3'- phosphorothioate
  modified_base 22: mod_base = OTHER; note = 2'-O-methyladenosine-3'- phosphorothioate
  modified_base 23: mod_base = OTHER; note = 2'-O-methylguanosine-3'-phosphate
tatttcacactaaccagttgaag

SEQ ID NO: 3954 - RNA, 23 nt, synthetic construct
  misc_feature 1..23: note = Description of Artificial Sequence: Synthetic oligonucleotide
  source 1..23: mol_type = other RNA
tttttatctgatctgtgattaaa

SEQ ID NO: 3955 - RNA, 23 nt, synthetic construct
  misc_feature 1..23: note = Description of Artificial Sequence: Synthetic oligonucleotide
  source 1..23: mol_type = other RNA
caactggttagtgtgaaatagtt

SEQ ID NO: 3956 - RNA, 23 nt, synthetic construct
  misc_feature 1..23: note = Description of Artificial Sequence: Synthetic oligonucleotide
  source 1..23: mol_type = other RNA
tgaacatgcctagtccaacattt

SEQ ID NO: 3957 - RNA, 23 nt, synthetic construct
  misc_feature 1..23: note = Description of Artificial Sequence: Synthetic oligonucleotide
  source 1..23: mol_type = other RNA
tccaagtccaatatggcaactct

SEQ ID NO: 3958 - RNA, 23 nt, synthetic construct
  misc_feature 1..23: note = Description of Artificial Sequence: Synthetic oligonucleotide
  source 1..23: mol_type = other RNA
tttccaccatgattaagggtctt

SEQ ID NO: 3959 - RNA, 23 nt, synthetic construct
  misc_feature 1..23: note = Description of Artificial Sequence: Synthetic oligonucleotide
  source 1..23: mol_type = other RNA
tatcatttcactgtctaggctac

SEQ ID NO: 3960 - RNA, 23 nt, synthetic construct
  misc_feature 1..23: note = Description of Artificial Sequence: Synthetic oligonucleotide
  source 1..23: mol_type = other RNA
gttgtcctttttatctgatctgt

SEQ ID NO: 3961 - RNA, 23 nt, synthetic construct
  misc_feature 1..23: note = Description of Artificial Sequence: Synthetic oligonucleotide
  source 1..23: mol_type = other RNA
atccagtgtataaatccaatatc

SEQ ID NO: 3962 - RNA, 23 nt, synthetic construct
  misc_feature 1..23: note = Description of Artificial Sequence: Synthetic oligonucleotide
  source 1..23: mol_type = other RNA
tatccaagtgttataccaactaa

SEQ ID NO: 3963 - RNA, 23 nt, synthetic construct
  misc_feature 1..23: note = Description of Artificial Sequence: Synthetic oligonucleotide
  source 1..23: mol_type = other RNA
atgtcatcgaagacaaattgaag

SEQ ID NO: 3964 - RNA, 23 nt, synthetic construct
  misc_feature 1..23: note = Description of Artificial Sequence: Synthetic oligonucleotide
  source 1..23: mol_type = other RNA
tagaacaccaaagattgtctctg

SEQ ID NO: 3965 - RNA, 23 nt, synthetic construct
  misc_feature 1..23: note = Description of Artificial Sequence: Synthetic oligonucleotide
  source 1..23: mol_type = other RNA
agaacaccaaagattgtctctgg

SEQ ID NO: 3966 - RNA, 23 nt, synthetic construct
  misc_feature 1..23: note = Description of Artificial Sequence: Synthetic oligonucleotide
  source 1..23: mol_type = other RNA
gcatgttgtcctttttatctgat

SEQ ID NO: 3967 - RNA, 23 nt, synthetic construct
  misc_feature 1..23: note = Description of Artificial Sequence: Synthetic oligonucleotide
  source 1..23: mol_type = other RNA
catcaactcctgaagttagaaat

SEQ ID NO: 3968 - RNA, 23 nt, synthetic construct
  misc_feature 1..23: note = Description of Artificial Sequence: Synthetic oligonucleotide
  source 1..23: mol_type = other RNA
ccaactatccaagtgttatacca

SEQ ID NO: 3969 - RNA, 23 nt, synthetic construct
  misc_feature 1..23: note = Description of Artificial Sequence: Synthetic oligonucleotide
  source 1..23: mol_type = other RNA
tttccttagaacaccaaagattg

SEQ ID NO: 3970 - RNA, 23 nt, synthetic construct
  misc_feature 1..23: note = Description of Artificial Sequence: Synthetic oligonucleotide
  source 1..23: mol_type = other RNA
atggtattaatcttgtgtagtct

SEQ ID NO: 3971 - RNA, 23 nt, synthetic construct
  misc_feature 1..23: note = Description of Artificial Sequence: Synthetic oligonucleotide
  source 1..23: mol_type = other RNA
ctggctccttcactgaacatgcc

SEQ ID NO: 3972 - RNA, 23 nt, synthetic construct
  misc_feature 1..23: note = Description of Artificial Sequence: Synthetic oligonucleotide
  source 1..23: mol_type = other RNA
tatatcagtagtgtacattacca

SEQ ID NO: 3973 - RNA, 23 nt, synthetic construct
  misc_feature 1..23: note = Description of Artificial Sequence: Synthetic oligonucleotide
  source 1..23: mol_type = other RNA
ggcagccttttccttagaacacc

SEQ ID NO: 3974 - RNA, 23 nt, synthetic construct
  misc_feature 1..23: note = Description of Artificial Sequence: Synthetic oligonucleotide
  source 1..23: mol_type = other RNA
aactggttagtgtgaaatagttc

SEQ ID NO: 3975 - RNA, 23 nt, synthetic construct
  misc_feature 1..23: note = Description of Artificial Sequence: Synthetic oligonucleotide
  source 1..23: mol_type = other RNA
gaactatatcagtagtgtacatt

SEQ ID NO: 3976 - RNA, 23 nt, synthetic construct
  misc_feature 1..23: note = Description of Artificial Sequence: Synthetic oligonucleotide
  source 1..23: mol_type = other RNA
actatatcagtagtgtacattac

SEQ ID NO: 3977 - RNA, 23 nt, synthetic construct
  misc_feature 1..23: note = Description of Artificial Sequence: Synthetic oligonucleotide
  source 1..23: mol_type = other RNA
cagtaatattttaagatggactg

SEQ ID NO: 3978 - RNA, 23 nt, synthetic construct
  misc_feature 1..23: note = Description of Artificial Sequence: Synthetic oligonucleotide
  source 1..23: mol_type = other RNA
tattttaagatggactgggaaaa

SEQ ID NO: 3979 - RNA, 23 nt, synthetic construct
  misc_feature 1..23: note = Description of Artificial Sequence: Synthetic oligonucleotide
  source 1..23: mol_type = other RNA
actggttagtgtgaaatagttct

SEQ ID NO: 3980 - RNA, 23 nt, synthetic construct
  misc_feature 1..23: note = Description of Artificial Sequence: Synthetic oligonucleotide
  source 1..23: mol_type = other RNA
ccttcactgaacatgcctagtcc

SEQ ID NO: 3981 - RNA, 23 nt, synthetic construct
  misc_feature 1..23: note = Description of Artificial Sequence: Synthetic oligonucleotide
  source 1..23: mol_type = other RNA
caaccaactatccaagtgttata

SEQ ID NO: 3982 - RNA, 23 nt, synthetic construct
  misc_feature 1..23: note = Description of Artificial Sequence: Synthetic oligonucleotide
  source 1..23: mol_type = other RNA
atccaagtgttataccaactaaa

SEQ ID NO: 3983 - RNA, 23 nt, synthetic construct
  misc_feature 1..23: note = Description of Artificial Sequence: Synthetic oligonucleotide
  source 1..23: mol_type = other RNA
gattccttttggttccaagtcca

SEQ ID NO: 3984 - RNA, 23 nt, synthetic construct
  misc_feature 1..23: note = Description of Artificial Sequence: Synthetic oligonucleotide
  source 1..23: mol_type = other RNA
tggcagccttttccttagaacac

SEQ ID NO: 3985 - RNA, 23 nt, synthetic construct
  misc_feature 1..23: note = Description of Artificial Sequence: Synthetic oligonucleotide
  source 1..23: mol_type = other RNA
gcagtaatattttaagatggact

SEQ ID NO: 3986 - RNA, 23 nt, synthetic construct
  misc_feature 1..23: note = Description of Artificial Sequence: Synthetic oligonucleotide
  source 1..23: mol_type = other RNA
gtaaaatccacagctatatcctg

SEQ ID NO: 3987 - RNA, 23 nt, synthetic construct
  misc_feature 1..23: note = Description of Artificial Sequence: Synthetic oligonucleotide
  source 1..23: mol_type = other RNA
gctccttcactgaacatgcctag

SEQ ID NO: 3988 - RNA, 23 nt, synthetic construct
  misc_feature 1..23: note = Description of Artificial Sequence: Synthetic oligonucleotide
  source 1..23: mol_type = other RNA
ttcactgaacatgcctagtccaa

SEQ ID NO: 3989 - RNA, 23 nt, synthetic construct
  misc_feature 1..23: note = Description of Artificial Sequence: Synthetic oligonucleotide
  source 1..23: mol_type = other RNA
ccaagtgttataccaactaaaac

SEQ ID NO: 3990 - RNA, 23 nt, synthetic construct
  misc_feature 1..23: note = Description of Artificial Sequence: Synthetic oligonucleotide
  source 1..23: mol_type = other RNA
gtttccaccatgattaagggtct

SEQ ID NO: 3991 - RNA, 23 nt, synthetic construct
  misc_feature 1..23: note = Description of Artificial Sequence: Synthetic oligonucleotide
  source 1..23: mol_type = other RNA
ctgaacatgcctagtccaacatt

SEQ ID NO: 3992 - RNA, 23 nt, synthetic construct
  misc_feature 1..23: note = Description of Artificial Sequence: Synthetic oligonucleotide
  source 1..23: mol_type = other RNA
atatcagtagtgtacattaccat

SEQ ID NO: 3993 - RNA, 23 nt, synthetic construct
  misc_feature 1..23: note = Description of Artificial Sequence: Synthetic oligonucleotide
  source 1..23: mol_type = other RNA
ctatccaagtgttataccaacta

SEQ ID NO: 3994 - RNA, 23 nt, synthetic construct
  misc_feature 1..23: note = Description of Artificial Sequence: Synthetic oligonucleotide
  source 1..23: mol_type = other RNA
ttccaagtccaatatggcaactc

SEQ ID NO: 3995 - RNA, 23 nt, synthetic construct
  misc_feature 1..23: note = Description of Artificial Sequence: Synthetic oligonucleotide
  source 1..23: mol_type = other RNA
gaatctcagaccttgtgaaggtg

SEQ ID NO: 3996 - RNA, 23 nt, synthetic construct
  misc_feature 1..23: note = Description of Artificial Sequence: Synthetic oligonucleotide
  source 1..23: mol_type = other RNA
atcatttcactgtctaggctaca

SEQ ID NO: 3997 - RNA, 23 nt, synthetic construct
  misc_feature 1..23: note = Description of Artificial Sequence: Synthetic oligonucleotide
  source 1..23: mol_type = other RNA
atccacagctatatcctgatgct

SEQ ID NO: 3998 - RNA, 23 nt, synthetic construct
  misc_feature 1..23: note = Description of Artificial Sequence: Synthetic oligonucleotide
  source 1..23: mol_type = other RNA
tccttcactgaacatgcctagtc

SEQ ID NO: 3999 - RNA, 23 nt, synthetic construct
  misc_feature 1..23: note = Description of Artificial Sequence: Synthetic oligonucleotide
  source 1..23: mol_type = other RNA
aggtggttgagagtgcttatgag

SEQ ID NO: 4000 - RNA, 23 nt, synthetic construct
  misc_feature 1..23: note = Description of Artificial Sequence: Synthetic oligonucleotide
  source 1..23: mol_type = other RNA
atcaaactcaaaggctacacatc

SEQ ID NO: 4001 - RNA, 23 nt, synthetic construct
  misc_feature 1..23: note = Description of Artificial Sequence: Synthetic oligonucleotide
  source 1..23: mol_type = other RNA
ctatatcagtagtgtacattacc

SEQ ID NO: 4002 - RNA, 23 nt, synthetic construct
  misc_feature 1..23: note = Description of Artificial Sequence: Synthetic oligonucleotide
  source 1..23: mol_type = other RNA
tgcaaccaactatccaagtgtta

SEQ ID NO: 4003 - RNA, 23 nt, synthetic construct
  misc_feature 1..23: note = Description of Artificial Sequence: Synthetic oligonucleotide
  source 1..23: mol_type = other RNA
tgtcatcgaagacaaattgaagg

SEQ ID NO: 4004 - RNA, 23 nt, synthetic construct
  misc_feature 1..23: note = Description of Artificial Sequence: Synthetic oligonucleotide
  source 1..23: mol_type = other RNA
tagcagatttggcagagagtata

SEQ ID NO: 4005 - RNA, 23 nt, synthetic construct
  misc_feature 1..23: note = Description of Artificial Sequence: Synthetic oligonucleotide
  source 1..23: mol_type = other RNA
ggctccttcactgaacatgccta

SEQ ID NO: 4006 - RNA, 23 nt, synthetic construct
  misc_feature 1..23: note = Description of Artificial Sequence: Synthetic oligonucleotide
  source 1..23: mol_type = other RNA
aacatgcctagtccaacattttt

SEQ ID NO: 4007 - RNA, 23 nt, synthetic construct
  misc_feature 1..23: note = Description of Artificial Sequence: Synthetic oligonucleotide
  source 1..23: mol_type = other RNA
tgtgccatcagtatcttaatgaa

SEQ ID NO: 4008 - RNA, 23 nt, synthetic construct
  misc_feature 1..23: note = Description of Artificial Sequence: Synthetic oligonucleotide
  source 1..23: mol_type = other RNA
gtgccatcagtatcttaatgaag

SEQ ID NO: 4009 - RNA, 23 nt, synthetic construct
  misc_feature 1..23: note = Description of Artificial Sequence: Synthetic oligonucleotide
  source 1..23: mol_type = other RNA
ccttagaacaccaaagattgtct

SEQ ID NO: 4010 - RNA, 23 nt, synthetic construct
  misc_feature 1..23: note = Description of Artificial Sequence: Synthetic oligonucleotide
  source 1..23: mol_type = other RNA
atatcatttcactgtctaggcta

SEQ ID NO: 4011 - RNA, 23 nt, synthetic construct
  misc_feature 1..23: note = Description of Artificial Sequence: Synthetic oligonucleotide
  source 1..23: mol_type = other RNA
tttcactgtctaggctacaacag

SEQ ID NO: 4012 - RNA, 23 nt, synthetic construct
  misc_feature 1..23: note = Description of Artificial Sequence: Synthetic oligonucleotide
  source 1..23: mol_type = other RNA
tgggatccagtgtataaatccaa

SEQ ID NO: 4013 - RNA, 23 nt, synthetic construct
  misc_feature 1..23: note = Description of Artificial Sequence: Synthetic oligonucleotide
  source 1..23: mol_type = other RNA
accaactatccaagtgttatacc

SEQ ID NO: 4014 - RNA, 23 nt, synthetic construct
  misc_feature 1..23: note = Description of Artificial Sequence: Synthetic oligonucleotide
  source 1..23: mol_type = other RNA
ttttggttccaagtccaatatgg

SEQ ID NO: 4015 - RNA, 23 nt, synthetic construct
  misc_feature 1..23: note = Description of Artificial Sequence: Synthetic oligonucleotide
  source 1..23: mol_type = other RNA
agtgcttatgaggtgatcaaact

SEQ ID NO: 4016 - RNA, 23 nt, synthetic construct
  misc_feature 1..23: note = Description of Artificial Sequence: Synthetic oligonucleotide
  source 1..23: mol_type = other RNA
tcaaactcaaaggctacacatcc

SEQ ID NO: 4017 - RNA, 23 nt, synthetic construct
  misc_feature 1..23: note = Description of Artificial Sequence: Synthetic oligonucleotide
  source 1..23: mol_type = other RNA
aatctcagaccttgtgaaggtga

SEQ ID NO: 4018 - RNA, 23 nt, synthetic construct
  misc_feature 1..23: note = Description of Artificial Sequence: Synthetic oligonucleotide
  source 1..23: mol_type = other RNA
tgtaaaatccacagctatatcct

SEQ ID NO: 4019 - RNA, 23 nt, synthetic construct
  misc_feature 1..23: note = Description of Artificial Sequence: Synthetic oligonucleotide
  source 1..23: mol_type = other RNA
ctccttcactgaacatgcctagt

SEQ ID NO: 4020 - RNA, 23 nt, synthetic construct
  misc_feature 1..23: note = Description of Artificial Sequence: Synthetic oligonucleotide
  source 1..23: mol_type = other RNA
ctgggatccagtgtataaatcca

SEQ ID NO: 4021 - RNA, 23 nt, synthetic construct
  misc_feature 1..23: note = Description of Artificial Sequence: Synthetic oligonucleotide
  source 1..23: mol_type = other RNA
cccaataaaccttgaacagtgac

SEQ ID NO: 4022 - RNA, 23 nt, synthetic construct
  misc_feature 1..23: note = Description of Artificial Sequence: Synthetic oligonucleotide
  source 1..23: mol_type = other RNA
atggcctgtgccatcagtatctt

SEQ ID NO: 4023 - RNA, 23 nt, synthetic construct
  misc_feature 1..23: note = Description of Artificial Sequence: Synthetic oligonucleotide
  source 1..23: mol_type = other RNA
tcttgttgatgtcatcgaagaca

SEQ ID NO: 4024 - RNA, 23 nt, synthetic construct
  misc_feature 1..23: note = Description of Artificial Sequence: Synthetic oligonucleotide
  source 1..23: mol_type = other RNA
aaggatcttattttgtgaactat

SEQ ID NO: 4025 - RNA, 23 nt, synthetic construct
  misc_feature 1..23: note = Description of Artificial Sequence: Synthetic oligonucleotide
  source 1..23: mol_type = other RNA
caaaggatcttattttgtgaact

SEQ ID NO: 4026 - RNA, 23 nt, synthetic construct
  misc_feature 1..23: note = Description of Artificial Sequence: Synthetic oligonucleotide
  source 1..23: mol_type = other RNA
atatcatgtcttgtgcataattc

SEQ ID NO: 4027 - RNA, 23 nt, synthetic construct
  misc_feature 1..23: note = Description of Artificial Sequence: Synthetic oligonucleotide
  source 1..23: mol_type = other RNA
gatgtcatatcatttcactgtct

SEQ ID NO: 4028 - RNA, 23 nt, synthetic construct
  misc_feature 1..23: note = Description of Artificial Sequence: Synthetic oligonucleotide
  source 1..23: mol_type = other RNA
tgtcatatcatttcactgtctag

SEQ ID NO: 4029 - RNA, 23 nt, synthetic construct
  misc_feature 1..23: note = Description of Artificial Sequence: Synthetic oligonucleotide
  source 1..23: mol_type = other RNA
tgatttataatcttctaaaggaa

SEQ ID NO: 4030 - RNA, 23 nt, synthetic construct
  misc_feature 1..23: note = Description of Artificial Sequence: Synthetic oligonucleotide
  source 1..23: mol_type = other RNA
aatggtttgtaaaatccacagct

SEQ ID NO: 4031 - RNA, 23 nt, synthetic construct
  misc_feature 1..23: note = Description of Artificial Sequence: Synthetic oligonucleotide
  source 1..23: mol_type = other RNA
tgatgctggatggtattaatctt

SEQ ID NO: 4032 - RNA, 23 nt, synthetic construct
  misc_feature 1..23: note = Description of Artificial Sequence: Synthetic oligonucleotide
  source 1..23: mol_type = other RNA
tgaactatatcagtagtgtacat

SEQ ID NO: 4033 - RNA, 23 nt, synthetic construct
  misc_feature 1..23: note = Description of Artificial Sequence: Synthetic oligonucleotide
  source 1..23: mol_type = other RNA
acatcaactcctgaagttagaaa

SEQ ID NO: 4034 - RNA, 23 nt, synthetic construct
  misc_feature 1..23: note = Description of Artificial Sequence: Synthetic oligonucleotide
  source 1..23: mol_type = other RNA
tgctggatggtattaatcttgtg

SEQ ID NO: 4035 - RNA, 23 nt, synthetic construct
  misc_feature 1..23: note = Description of Artificial Sequence: Synthetic oligonucleotide
  source 1..23: mol_type = other RNA
catatcatttcactgtctaggct

SEQ ID NO: 4036 - RNA, 23 nt, synthetic construct
  misc_feature 1..23: note = Description of Artificial Sequence: Synthetic oligonucleotide
  source 1..23: mol_type = other RNA
ttgtaaaatccacagctatatcc

SEQ ID NO: 4037 - RNA, 23 nt, synthetic construct
  misc_feature 1..23: note = Description of Artificial Sequence: Synthetic oligonucleotide
  source 1..23: mol_type = other RNA
cttccttagtgttccttgcattt

SEQ ID NO: 4038 - RNA, 23 nt, synthetic construct
  misc_feature 1..23: note = Description of Artificial Sequence: Synthetic oligonucleotide
  source 1..23: mol_type = other RNA
gtcatatcatttcactgtctagg

SEQ ID NO: 4039 - RNA, 23 nt, synthetic construct
  misc_feature 1..23: note = Description of Artificial Sequence: Synthetic oligonucleotide
  source 1..23: mol_type = other RNA
aaaacatcaactcctgaagttag

SEQ ID NO: 4040 - RNA, 23 nt, synthetic construct
  misc_feature 1..23: note = Description of Artificial Sequence: Synthetic oligonucleotide
  source 1..23: mol_type = other RNA
atcctgatgctggatggtattaa

SEQ ID NO: 4041 - RNA, 23 nt, synthetic construct
  misc_feature 1..23: note = Description of Artificial Sequence: Synthetic oligonucleotide
  source 1..23: mol_type = other RNA
acaatgcaaccaactatccaagt

SEQ ID NO: 4042 - RNA, 23 nt, synthetic construct
  misc_feature 1..23: note = Description of Artificial Sequence: Synthetic oligonucleotide
  source 1..23: mol_type = other RNA
tctttacggaataaaggatgatg

SEQ ID NO: 4043 - RNA, 23 nt, synthetic construct
  misc_feature 1..23: note = Description of Artificial Sequence: Synthetic oligonucleotide
  source 1..23: mol_type = other RNA
tcttccttagtgttccttgcatt

SEQ ID NO: 4044 - RNA, 23 nt, synthetic construct
  misc_feature 1..23: note = Description of Artificial Sequence: Synthetic oligonucleotide
  source 1..23: mol_type = other RNA
aacaatgcaaccaactatccaag

SEQ ID NO: 4045 - RNA, 23 nt, synthetic construct
  misc_feature 1..23: note = Description of Artificial Sequence: Synthetic oligonucleotide
  source 1..23: mol_type = other RNA
gcagatttggcagagagtataat

SEQ ID NO: 4046 - RNA, 23 nt, synthetic construct
  misc_feature 1..23: note = Description of Artificial Sequence: Synthetic oligonucleotide
  source 1..23: mol_type = other RNA
agtttccaccatgattaagggtc

SEQ ID NO: 4047 - RNA, 23 nt, synthetic construct
  misc_feature 1..23: note = Description of Artificial Sequence: Synthetic oligonucleotide
  source 1..23: mol_type = other RNA
caactggttagtgtgaaatagtt

SEQ ID NO: 4048 - RNA, 23 nt, synthetic construct
  misc_feature 1..23: note = Description of Artificial Sequence: Synthetic oligonucleotide
  source 1..23: mol_type = other RNA
tccaagtccaatatggcaactct

SEQ ID NO: 4049 - RNA, 23 nt, synthetic construct
  misc_feature 1..23: note = Description of Artificial Sequence: Synthetic oligonucleotide
  source 1..23: mol_type = other RNA
tttccaccatgattaagggtctt

SEQ ID NO: 4050 - RNA, 23 nt, synthetic construct
  misc_feature 1..23: note = Description of Artificial Sequence: Synthetic oligonucleotide
  source 1..23: mol_type = other RNA
tatcatttcactgtctaggctac

SEQ ID NO: 4051 - RNA, 23 nt, synthetic construct
  misc_feature 1..23: note = Description of Artificial Sequence: Synthetic oligonucleotide
  source 1..23: mol_type = other RNA
gttgtcctttttatctgatctgt

SEQ ID NO: 4052 - RNA, 23 nt, synthetic construct
  misc_feature 1..23: note = Description of Artificial Sequence: Synthetic oligonucleotide
  source 1..23: mol_type = other RNA
atccagtgtataaatccaatatc

SEQ ID NO: 4053 - RNA, 23 nt, synthetic construct
  misc_feature 1..23: note = Description of Artificial Sequence: Synthetic oligonucleotide
  source 1..23: mol_type = other RNA
tatccaagtgttataccaactaa

SEQ ID NO: 4054 - RNA, 23 nt, synthetic construct
  misc_feature 1..23: note = Description of Artificial Sequence: Synthetic oligonucleotide
  source 1..23: mol_type = other RNA
tagaacaccaaagattgtctctg

SEQ ID NO: 4055 - RNA, 23 nt, synthetic construct
  misc_feature 1..23: note = Description of Artificial Sequence: Synthetic oligonucleotide
  source 1..23: mol_type = other RNA
agaacaccaaagattgtctctgg

SEQ ID NO: 4056 - RNA, 23 nt, synthetic construct
  misc_feature 1..23: note = Description of Artificial Sequence: Synthetic oligonucleotide
  source 1..23: mol_type = other RNA
gcatgttgtcctttttatctgat

SEQ ID NO: 4057 - RNA, 23 nt, synthetic construct
  misc_feature 1..23: note = Description of Artificial Sequence: Synthetic oligonucleotide
  source 1..23: mol_type = other RNA
catcaactcctgaagttagaaat

SEQ ID NO: 4058 - RNA, 23 nt, synthetic construct
  misc_feature 1..23: note = Description of Artificial Sequence: Synthetic oligonucleotide
  source 1..23: mol_type = other RNA
ccaactatccaagtgttatacca

SEQ ID NO: 4059 - RNA, 23 nt, synthetic construct
  misc_feature 1..23: note = Description of Artificial Sequence: Synthetic oligonucleotide
  source 1..23: mol_type = other RNA
atggtattaatcttgtgtagtct

SEQ ID NO: 4060 - RNA, 23 nt, synthetic construct
  misc_feature 1..23: note = Description of Artificial Sequence: Synthetic oligonucleotide
  source 1..23: mol_type = other RNA
ctggctccttcactgaacatgcc

SEQ ID NO: 4061 - RNA, 23 nt, synthetic construct
  misc_feature 1..23: note = Description of Artificial Sequence: Synthetic oligonucleotide
  source 1..23: mol_type = other RNA
tatatcagtagtgtacattacca

SEQ ID NO: 4062 - RNA, 23 nt, synthetic construct
  misc_feature 1..23: note = Description of Artificial Sequence: Synthetic oligonucleotide
  source 1..23: mol_type = other RNA
ggcagccttttccttagaacacc

SEQ ID NO: 4063 - RNA, 23 nt, synthetic construct
  misc_feature 1..23: note = Description of Artificial Sequence: Synthetic oligonucleotide
  source 1..23: mol_type = other RNA
aactggttagtgtgaaatagttc

SEQ ID NO: 4064 - RNA, 23 nt, synthetic construct
  misc_feature 1..23: note = Description of Artificial Sequence: Synthetic oligonucleotide
  source 1..23: mol_type = other RNA
gaactatatcagtagtgtacatt

SEQ ID NO: 4065 - RNA, 23 nt, synthetic construct
  misc_feature 1..23: note = Description of Artificial Sequence: Synthetic oligonucleotide
  source 1..23: mol_type = other RNA
actatatcagtagtgtacattac

SEQ ID NO: 4066 - RNA, 23 nt, synthetic construct
  misc_feature 1..23: note = Description of Artificial Sequence: Synthetic oligonucleotide
  source 1..23: mol_type = other RNA
cagtaatattttaagatggactg

SEQ ID NO: 4067 - RNA, 23 nt, synthetic construct
  misc_feature 1..23: note = Description of Artificial Sequence: Synthetic oligonucleotide
  source 1..23: mol_type = other RNA
tattttaagatggactgggaaaa

SEQ ID NO: 4068 - RNA, 23 nt, synthetic construct
  misc_feature 1..23: note = Description of Artificial Sequence: Synthetic oligonucleotide
  source 1..23: mol_type = other RNA
ccttcactgaacatgcctagtcc

SEQ ID NO: 4069 - RNA, 23 nt, synthetic construct
  misc_feature 1..23: note = Description of Artificial Sequence: Synthetic oligonucleotide
  source 1..23: mol_type = other RNA
caaccaactatccaagtgttata

SEQ ID NO: 4070 - RNA, 23 nt, synthetic construct
  misc_feature 1..23: note = Description of Artificial Sequence: Synthetic oligonucleotide
  source 1..23: mol_type = other RNA
atccaagtgttataccaactaaa

SEQ ID NO: 4071 - RNA, 23 nt, synthetic construct
  misc_feature 1..23: note = Description of Artificial Sequence: Synthetic oligonucleotide
  source 1..23: mol_type = other RNA
gcagtaatattttaagatggact

SEQ ID NO: 4072 - RNA, 23 nt, synthetic construct
  misc_feature 1..23: note = Description of Artificial Sequence: Synthetic oligonucleotide
  source 1..23: mol_type = other RNA
gtaaaatccacagctatatcctg

SEQ ID NO: 4073 - RNA, 23 nt, synthetic construct
  misc_feature 1..23: note = Description of Artificial Sequence: Synthetic oligonucleotide
  source 1..23: mol_type = other RNA
gctccttcactgaacatgcctag

SEQ ID NO: 4074 - RNA, 23 nt, synthetic construct
  misc_feature 1..23: note = Description of Artificial Sequence: Synthetic oligonucleotide
  source 1..23: mol_type = other RNA
ttcactgaacatgcctagtccaa

SEQ ID NO: 4075 - RNA, 23 nt, synthetic construct
  misc_feature 1..23: note = Description of Artificial Sequence: Synthetic oligonucleotide
  source 1..23: mol_type = other RNA
ccaagtgttataccaactaaaac

SEQ ID NO: 4076 - RNA, 23 nt, synthetic construct
  misc_feature 1..23: note = Description of Artificial Sequence: Synthetic oligonucleotide
  source 1..23: mol_type = other RNA
gtttccaccatgattaagggtct

SEQ ID NO: 4077 - RNA, 23 nt, synthetic construct
  misc_feature 1..23: note = Description of Artificial Sequence: Synthetic oligonucleotide
  source 1..23: mol_type = other RNA
ctgaacatgcctagtccaacatt

SEQ ID NO: 4078 - RNA, 23 nt, synthetic construct
  misc_feature 1..23: note = Description of Artificial Sequence: Synthetic oligonucleotide
  source 1..23: mol_type = other RNA
atatcagtagtgtacattaccat

SEQ ID NO: 4079 - RNA, 23 nt, synthetic construct
  misc_feature 1..23: note = Description of Artificial Sequence: Synthetic oligonucleotide
  source 1..23: mol_type = other RNA
ctatccaagtgttataccaacta

SEQ ID NO: 4080 - RNA, 23 nt, synthetic construct
  misc_feature 1..23: note = Description of Artificial Sequence: Synthetic oligonucleotide
  source 1..23: mol_type = other RNA
ttccaagtccaatatggcaactc

SEQ ID NO: 4081 - RNA, 23 nt, synthetic construct
  misc_feature 1..23: note = Description of Artificial Sequence: Synthetic oligonucleotide
  source 1..23: mol_type = other RNA
atcatttcactgtctaggctaca

SEQ ID NO: 4082 - RNA, 23 nt, synthetic construct
  misc_feature 1..23: note = Description of Artificial Sequence: Synthetic oligonucleotide
  source 1..23: mol_type = other RNA
atccacagctatatcctgatgct

SEQ ID NO: 4083 - RNA, 23 nt, synthetic construct
  misc_feature 1..23: note = Description of Artificial Sequence: Synthetic oligonucleotide
  source 1..23: mol_type = other RNA
tccttcactgaacatgcctagtc

SEQ ID NO: 4084 - RNA, 23 nt, synthetic construct
  misc_feature 1..23: note = Description of Artificial Sequence: Synthetic oligonucleotide
  source 1..23: mol_type = other RNA
aggtggttgagagtgcttatgag

SEQ ID NO: 4085 - RNA, 23 nt, synthetic construct
  misc_feature 1..23: note = Description of Artificial Sequence: Synthetic oligonucleotide
  source 1..23: mol_type = other RNA
ctatatcagtagtgtacattacc

SEQ ID NO: 4086 - RNA, 23 nt, synthetic construct
  misc_feature 1..23: note = Description of Artificial Sequence: Synthetic oligonucleotide
  source 1..23: mol_type = other RNA
tgcaaccaactatccaagtgtta

SEQ ID NO: 4087 - RNA, 23 nt, synthetic construct
  misc_feature 1..23: note = Description of Artificial Sequence: Synthetic oligonucleotide
  source 1..23: mol_type = other RNA
tagcagatttggcagagagtata

SEQ ID NO: 4088 - RNA, 23 nt, synthetic construct
  misc_feature 1..23: note = Description of Artificial Sequence: Synthetic oligonucleotide
  source 1..23: mol_type = other RNA
ggctccttcactgaacatgccta

SEQ ID NO: 4089 - RNA, 23 nt, synthetic construct
  misc_feature 1..23: note = Description of Artificial Sequence: Synthetic oligonucleotide
  source 1..23: mol_type = other RNA
aacatgcctagtccaacattttt

SEQ ID NO: 4090 - RNA, 23 nt, synthetic construct
  misc_feature 1..23: note = Description of Artificial Sequence: Synthetic oligonucleotide
  source 1..23: mol_type = other RNA
tgtgccatcagtatcttaatgaa

SEQ ID NO: 4091 - RNA, 23 nt, synthetic construct
  misc_feature 1..23: note = Description of Artificial Sequence: Synthetic oligonucleotide
  source 1..23: mol_type = other RNA
gtgccatcagtatcttaatgaag

SEQ ID NO: 4092 - RNA, 23 nt, synthetic construct
  misc_feature 1..23: note = Description of Artificial Sequence: Synthetic oligonucleotide
  source 1..23: mol_type = other RNA
ccttagaacaccaaagattgtct

SEQ ID NO: 4093 - RNA, 23 nt, synthetic construct
  misc_feature 1..23: note = Description of Artificial Sequence: Synthetic oligonucleotide
  source 1..23: mol_type = other RNA
atatcatttcactgtctaggcta

SEQ ID NO: 4094 - RNA, 23 nt, synthetic construct
  misc_feature 1..23: note = Description of Artificial Sequence: Synthetic oligonucleotide
  source 1..23: mol_type = other RNA
tttcactgtctaggctacaacag

SEQ ID NO: 4095 - RNA, 23 nt, synthetic construct
  misc_feature 1..23: note = Description of Artificial Sequence: Synthetic oligonucleotide
  source 1..23: mol_type = other RNA
accaactatccaagtgttatacc

SEQ ID NO: 4096 - RNA, 23 nt, synthetic construct
  misc_feature 1..23: note = Description of Artificial Sequence: Synthetic oligonucleotide
  source 1..23: mol_type = other RNA
ttttggttccaagtccaatatgg

SEQ ID NO: 4097 - RNA, 23 nt, synthetic construct
  misc_feature 1..23: note = Description of Artificial Sequence: Synthetic oligonucleotide
  source 1..23: mol_type = other RNA
agtgcttatgaggtgatcaaact

SEQ ID NO: 4098 - RNA, 23 nt, synthetic construct
  misc_feature 1..23: note = Description of Artificial Sequence: Synthetic oligonucleotide
  source 1..23: mol_type = other RNA
aatctcagaccttgtgaaggtga

SEQ ID NO: 4099 - RNA, 23 nt, synthetic construct
  misc_feature 1..23: note = Description of Artificial Sequence: Synthetic oligonucleotide
  source 1..23: mol_type = other RNA
tgtaaaatccacagctatatcct

SEQ ID NO: 4100 - RNA, 23 nt, synthetic construct
  misc_feature 1..23: note = Description of Artificial Sequence: Synthetic oligonucleotide
  source 1..23: mol_type = other RNA
ctccttcactgaacatgcctagt

SEQ ID NO: 4101 - RNA, 23 nt, synthetic construct
  misc_feature 1..23: note = Description of Artificial Sequence: Synthetic oligonucleotide
  source 1..23: mol_type = other RNA
ctgggatccagtgtataaatcca

SEQ ID NO: 4102 - RNA, 23 nt, synthetic construct
  misc_feature 1..23: note = Description of Artificial Sequence: Synthetic oligonucleotide
  source 1..23: mol_type = other RNA
cccaataaaccttgaacagtgac

SEQ ID NO: 4103 - RNA, 23 nt, synthetic construct
  misc_feature 1..23: note = Description of Artificial Sequence: Synthetic oligonucleotide
  source 1..23: mol_type = other RNA
atggcctgtgccatcagtatctt

SEQ ID NO: 4104 - RNA, 23 nt, synthetic construct
  misc_feature 1..23: note = Description of Artificial Sequence: Synthetic oligonucleotide
  source 1..23: mol_type = other RNA
tcttgttgatgtcatcgaagaca

SEQ ID NO: 4105 - RNA, 23 nt, synthetic construct
  misc_feature 1..23: note = Description of Artificial Sequence: Synthetic oligonucleotide
  source 1..23: mol_type = other RNA
gcagatttggcagagagtataat

SEQ ID NO: 4106 - RNA, 23 nt, synthetic construct
  misc_feature 1..23: note = Description of Artificial Sequence: Synthetic oligonucleotide
  source 1..23: mol_type = other RNA
agtttccaccatgattaagggtc

SEQ ID NO: 4107 - RNA, 23 nt, synthetic construct
  misc_feature 1..23: note = Description of Artificial Sequence: Synthetic oligonucleotide
  source 1..23: mol_type = other RNA
gtctaggctacaacaggattcta

SEQ ID NO: 4108 - RNA, 23 nt, synthetic construct
  misc_feature 1..23: note = Description of Artificial Sequence: Synthetic oligonucleotide
  source 1..23: mol_type = other RNA
ggtggaggttgtgcatgttgtcc

SEQ ID NO: 4109 - RNA, 23 nt, synthetic construct
  misc_feature 1..23: note = Description of Artificial Sequence: Synthetic oligonucleotide
  source 1..23: mol_type = other RNA
tggctccttcactgaacatgcct

SEQ ID NO: 4110 - RNA, 23 nt, synthetic construct
  misc_feature 1..23: note = Description of Artificial Sequence: Synthetic oligonucleotide
  source 1..23: mol_type = other RNA
tccttttggttccaagtccaata

SEQ ID NO: 4111 - RNA, 23 nt, synthetic construct
  misc_feature 1..23: note = Description of Artificial Sequence: Synthetic oligonucleotide
  source 1..23: mol_type = other RNA
tggcctgtgccatcagtatctta

SEQ ID NO: 4112 - RNA, 23 nt, synthetic construct
  misc_feature 1..23: note = Description of Artificial Sequence: Synthetic oligonucleotide
  source 1..23: mol_type = other RNA
gtgcttatgaggtgatcaaactc

SEQ ID NO: 4113 - RNA, 23 nt, synthetic construct
  misc_feature 1..23: note = Description of Artificial Sequence: Synthetic oligonucleotide
  source 1..23: mol_type = other RNA
tgcttatgaggtgatcaaactca

SEQ ID NO: 4114 - RNA, 23 nt, synthetic construct
  misc_feature 1..23: note = Description of Artificial Sequence: Synthetic oligonucleotide
  source 1..23: mol_type = other RNA
ttccttgcattttgggacagaat

SEQ ID NO: 4115 - RNA, 23 nt, synthetic construct
  misc_feature 1..23: note = Description of Artificial Sequence: Synthetic oligonucleotide
  source 1..23: mol_type = other RNA
ttggttccaagtccaatatggca

SEQ ID NO: 4116 - RNA, 23 nt, synthetic construct
  misc_feature 1..23: note = Description of Artificial Sequence: Synthetic oligonucleotide
  source 1..23: mol_type = other RNA
ttcactgtctaggctacaacagg

SEQ ID NO: 4117 - RNA, 23 nt, synthetic construct
  misc_feature 1..23: note = Description of Artificial Sequence: Synthetic oligonucleotide
  source 1..23: mol_type = other RNA
tcactgtctaggctacaacagga

SEQ ID NO: 4118 - RNA, 23 nt, synthetic construct
  misc_feature 1..23: note = Description of Artificial Sequence: Synthetic oligonucleotide
  source 1..23: mol_type = other RNA
agaataagattacagttgttggg

SEQ ID NO: 4119 - RNA, 23 nt, synthetic construct
  misc_feature 1..23: note = Description of Artificial Sequence: Synthetic oligonucleotide
  source 1..23: mol_type = other RNA
tggttgagagtgcttatgaggtg

SEQ ID NO: 4120 - RNA, 23 nt, synthetic construct
  misc_feature 1..23: note = Description of Artificial Sequence: Synthetic oligonucleotide
  source 1..23: mol_type = other RNA
ctgtctaggctacaacaggattc

SEQ ID NO: 4121 - RNA, 23 nt, synthetic construct
  misc_feature 1..23: note = Description of Artificial Sequence: Synthetic oligonucleotide
  source 1..23: mol_type = other RNA
tgtctaggctacaacaggattct

SEQ ID NO: 4122 - RNA, 23 nt, synthetic construct
  misc_feature 1..23: note = Description of Artificial Sequence: Synthetic oligonucleotide
  source 1..23: mol_type = other RNA
aggtggaggttgtgcatgttgtc

SEQ ID NO: 4123 - RNA, 23 nt, synthetic construct
  misc_feature 1..23: note = Description of Artificial Sequence: Synthetic oligonucleotide
  source 1..23: mol_type = other RNA
tatgaggtgatcaaactcaaagg

SEQ ID NO: 4124 - RNA, 23 nt, synthetic construct
  misc_feature 1..23: note = Description of Artificial Sequence: Synthetic oligonucleotide
  source 1..23: mol_type = other RNA
aggtgatcaaactcaaaggctac

SEQ ID NO: 4125 - RNA, 23 nt, synthetic construct
  misc_feature 1..23: note = Description of Artificial Sequence: Synthetic oligonucleotide
  source 1..23: mol_type = other RNA
tctgaggaagaggcccgtttgaa

SEQ ID NO: 4126 - RNA, 23 nt, synthetic construct
  misc_feature 1..23: note = Description of Artificial Sequence: Synthetic oligonucleotide
  source 1..23: mol_type = other RNA
tcacaagcaggtggttgagagtg

SEQ ID NO: 4127 - RNA, 23 nt, synthetic construct
  misc_feature 1..23: note = Description of Artificial Sequence: Synthetic oligonucleotide
  source 1..23: mol_type = other RNA
agcagatttggcagagagtataa

SEQ ID NO: 4128 - RNA, 23 nt, synthetic construct
  misc_feature 1..23: note = Description of Artificial Sequence: Synthetic oligonucleotide
  source 1..23: mol_type = other RNA
gagtgcttatgaggtgatcaaac

SEQ ID NO: 4129 - RNA, 23 nt, synthetic construct
  misc_feature 1..23: note = Description of Artificial Sequence: Synthetic oligonucleotide
  source 1..23: mol_type = other RNA
gtagcagatttggcagagagtat

SEQ ID NO: 4130 - RNA, 23 nt, synthetic construct
  misc_feature 1..23: note = Description of Artificial Sequence: Synthetic oligonucleotide
  source 1..23: mol_type = other RNA
agatttggcagagagtataatga

SEQ ID NO: 4131 - RNA, 23 nt, synthetic construct
  misc_feature 1..23: note = Description of Artificial Sequence: Synthetic oligonucleotide
  source 1..23: mol_type = other RNA
gatttggcagagagtataatgaa

SEQ ID NO: 4132 - RNA, 23 nt, synthetic construct
  misc_feature 1..23: note = Description of Artificial Sequence: Synthetic oligonucleotide
  source 1..23: mol_type = other RNA
tccttgcattttgggacagaatg

SEQ ID NO: 4133 - RNA, 23 nt, synthetic construct
  misc_feature 1..23: note = Description of Artificial Sequence: Synthetic oligonucleotide
  source 1..23: mol_type = other RNA
gaatggaatctcagaccttgtga

SEQ ID NO: 4134 - RNA, 23 nt, synthetic construct
  misc_feature 1..23: note = Description of Artificial Sequence: Synthetic oligonucleotide
  source 1..23: mol_type = other RNA
tccacagctatatcctgatgctg

SEQ ID NO: 4135 - RNA, 23 nt, synthetic construct
  misc_feature 1..23: note = Description of Artificial Sequence: Synthetic oligonucleotide
  source 1..23: mol_type = other RNA
ctgaggaagaggcccgtttgaag

SEQ ID NO: 4136 - RNA, 23 nt, synthetic construct
  misc_feature 1..23: note = Description of Artificial Sequence: Synthetic oligonucleotide
  source 1..23: mol_type = other RNA
cttctgaggaagaggcccgtttg

SEQ ID NO: 4137 - RNA, 23 nt, synthetic construct
  misc_feature 1..23: note = Description of Artificial Sequence: Synthetic oligonucleotide
  source 1..23: mol_type = other RNA
gtcacatcctgggatccagtgta

SEQ ID NO: 4138 - RNA, 23 nt, synthetic construct
  misc_feature 1..23: note = Description of Artificial Sequence: Synthetic oligonucleotide
  source 1..23: mol_type = other RNA
gcagccttttccttagaacacca

SEQ ID NO: 4139 - RNA, 23 nt, synthetic construct
  misc_feature 1..23: note = Description of Artificial Sequence: Synthetic oligonucleotide
  source 1..23: mol_type = other RNA
cttcaactggttagtgtgaaata

SEQ ID NO: 4140 - RNA, 21 nt, synthetic construct
  misc_feature 1..21: note = Description of Artificial Sequence: Synthetic oligonucleotide
  source 1..21: mol_type = other RNA
  modified_base 1: mod_base = OTHER; note = 2'-fluoroguanosine-3'-phosphorothioate
  modified_base 2: mod_base = OTHER; note = 2'-O-methyladenosine-3'- phosphorothioate
  modified_base 3: mod_base = OTHER; note = 2'-fluoroadenosine-3'-phosphate
  modified_base 4: mod_base = OTHER; note = 2'-O-methyluridine-3'-phosphate
  modified_base 5: mod_base = OTHER; note = 2'-fluoroguanosine-3'-phosphate
  modified_base 6: mod_base = OTHER; note = 2'-O-methyluridine-3'-phosphate
  modified_base 7: mod_base = OTHER; note = 2'-fluoroguanosine-3'-phosphate
  modified_base 8: mod_base = OTHER; note = 2'-O-methyladenosine-3'-phosphate
  modified_base 9: mod_base = OTHER; note = 2'-fluoroadenosine-3'-phosphate
  modified_base 10: mod_base = OTHER; note = 2'-fluoroadenosine-3'-phosphate
  modified_base 11: mod_base = OTHER; note = 2'-fluoroguanosine-3'-phosphate
  modified_base 12: mod_base = OTHER; note = 2'-O-methyluridine-3'-phosphate
  modified_base 13: mod_base = OTHER; note = 2'-fluorocytidine-3'-phosphate
  modified_base 14: mod_base = OTHER; note = 2'-O-methyladenosine-3'-phosphate
  modified_base 15: mod_base = OTHER; note = 2'-fluorouridine-3'-phosphate
  modified_base 16: mod_base = OTHER; note = 2'-O-methylcytidine-3'-phosphate
  modified_base 17: mod_base = OTHER; note = 2'-fluoroguanosine-3'-phosphate
  modified_base 18: mod_base = OTHER; note = 2'-O-methyladenosine-3'-phosphate
  modified_base 19: mod_base = OTHER; note = 2'-fluorocytidine-3'-phosphate
  modified_base 20: mod_base = OTHER; note = 2'-O-methyladenosine-3'-phosphate
  modified_base 21: mod_base = OTHER; note = 2'-fluoroadenosine-3'-phosphate attached to N-[tris(N-acetylgalactosamine-alkyl)-amidodecanoyl)]-4-hydr oxyprolinol Hyp-(N-acetylgalactosamine-alkyl)3
gaatgtgaaagtcatcgacaa

SEQ ID NO: 4141 - RNA, 21 nt, synthetic construct
  misc_feature 1..21: note = Description of Artificial Sequence: Synthetic oligonucleotide
  source 1..21: mol_type = other RNA
  modified_base 1: mod_base = OTHER; note = 2'-fluorouridine -3'-phosphorothioate
  modified_base 2: mod_base = OTHER; note = 2'-O-methyluridine-3'-phosphorothioate
  modified_base 3: mod_base = OTHER; note = 2'-fluorouridine-3'-phosphate
  modified_base 4: mod_base = OTHER; note = 2'-O-methyluridine-3'-phosphate
  modified_base 5: mod_base = OTHER; note = 2'-fluorocytidine-3'-phosphate
  modified_base 6: mod_base = OTHER; note = 2'-O-methyladenosine-3'-phosphate
  modified_base 7: mod_base = OTHER; note = 2'-fluoroadenosine-3'-phosphate
  modified_base 8: mod_base = OTHER; note = 2'-O-methyluridine-3'-phosphate
  modified_base 9: mod_base = OTHER; note = 2'-fluoroguanosine-3'-phosphate
  modified_base 10: mod_base = OTHER; note = 2'-fluoroguanosine-3'-phosphate
  modified_base 11: mod_base = OTHER; note = 2'-fluoroguanosine-3'-phosphate
  modified_base 12: mod_base = OTHER; note = 2'-O-methyluridine-3'-phosphate
  modified_base 13: mod_base = OTHER; note = 2'-fluoroguanosine-3'-phosphate
  modified_base 14: mod_base = OTHER; note = 2'-O-methyluridine-3'-phosphate
  modified_base 15: mod_base = OTHER; note = 2'-fluorocytidine-3'-phosphate
  modified_base 16: mod_base = OTHER; note = 2'-O-methylcytidine-3'-phosphate
  modified_base 17: mod_base = OTHER; note = 2'-fluorouridine-3'-phosphate
  modified_base 18: mod_base = OTHER; note = 2'-O-methyladenosine-3'-phosphate
  modified_base 19: mod_base = OTHER; note = 2'-fluoroguanosine-3'-phosphate
  modified_base 20: mod_base = OTHER; note = 2'-O-methylguanosine-3'-phosphate
  modified_base 21: mod_base = OTHER; note = 2'-fluoroadenosine-3'-phosphate attached to N-[tris(N-acetylgalactosamine-alkyl)-amidodecanoyl)]-4-hydr oxyprolinol Hyp-(N-acetylgalactosamine-alkyl)3
ttttcaatgggtgtcctagga

SEQ ID NO: 4142 - RNA, 21 nt, synthetic construct
  misc_feature 1..21: note = Description of Artificial Sequence: Synthetic oligonucleotide
  source 1..21: mol_type = other RNA
  modified_base 1: mod_base = OTHER; note = 2'-fluoroguanosine-3'-phosphorothioate
  modified_base 2: mod_base = OTHER; note = 2'-O-methyladenosine-3'- phosphorothioate
  modified_base 3: mod_base = OTHER; note = 2'-fluoroadenosine-3'-phosphate
  modified_base 4: mod_base = OTHER; note = 2'-O-methyladenosine-3'-phosphate
  modified_base 5: mod_base = OTHER; note = 2'-fluoroguanosine-3'-phosphate
  modified_base 6: mod_base = OTHER; note = 2'-O-methyluridine-3'-phosphate
  modified_base 7: mod_base = OTHER; note = 2'-fluorocytidine-3'-phosphate
  modified_base 8: mod_base = OTHER; note = 2'-O-methyladenosine-3'-phosphate
  modified_base 9: mod_base = OTHER; note = 2'-fluorouridine-3'-phosphate
  modified_base 10: mod_base = OTHER; note = 2'-fluorocytidine-3'-phosphate
  modified_base 11: mod_base = OTHER; note = 2'-fluoroguanosine-3'-phosphate
  modified_base 12: mod_base = OTHER; note = 2'-O-methyladenosine-3'-phosphate
  modified_base 13: mod_base = OTHER; note = 2'-fluorocytidine-3'-phosphate
  modified_base 14: mod_base = OTHER; note = 2'-O-methyladenosine-3'-phosphate
  modified_base 15: mod_base = OTHER; note = 2'-fluoroadenosine-3'-phosphate
  modified_base 16: mod_base = OTHER; note = 2'-O-methylguanosine-3'-phosphate
  modified_base 17: mod_base = OTHER; note = 2'-fluoroadenosine-3'-phosphate
  modified_base 18: mod_base = OTHER; note = 2'-O-methylcytidine-3'-phosphate
  modified_base 19: mod_base = OTHER; note = 2'-fluoroadenosine-3'-phosphate
  modified_base 20: mod_base = OTHER; note = 2'-O-methyluridine-3'-phosphate
  modified_base 21: mod_base = OTHER; note = 2'-fluorouridine-3'-phosphate attached to N-[tris(N-acetylgalactosamine-alkyl)-amidodecanoyl)]-4-hydr oxyprolinol Hyp-(N-acetylgalactosamine-alkyl)3
gaaagtcatcgacaagacatt

SEQ ID NO: 4143 - RNA, 21 nt, synthetic construct
  misc_feature 1..21: note = Description of Artificial Sequence: Synthetic oligonucleotide
  source 1..21: mol_type = other RNA
  modified_base 1: mod_base = OTHER; note = 2'-fluorouridine -3'-phosphorothioate
  modified_base 2: mod_base = OTHER; note = 2'-O-methylcytidine-3'- phosphorothioate
  modified_base 3: mod_base = OTHER; note = 2'-fluoroadenosine-3'-phosphate
  modified_base 4: mod_base = OTHER; note = 2'-O-methyluridine-3'-phosphate
  modified_base 5: mod_base = OTHER; note = 2'-fluorocytidine-3'-phosphate
  modified_base 6: mod_base = OTHER; note = 2'-O-methylguanosine-3'-phosphate
  modified_base 7: mod_base = OTHER; note = 2'-fluoroadenosine-3'-phosphate
  modified_base 8: mod_base = OTHER; note = 2'-O-methylcytidine-3'-phosphate
  modified_base 9: mod_base = OTHER; note = 2'-fluoroadenosine-3'-phosphate
  modified_base 10: mod_base = OTHER; note = 2'-fluoroadenosine-3'-phosphate
  modified_base 11: mod_base = OTHER; note = 2'-fluoroguanosine-3'-phosphate
  modified_base 12: mod_base = OTHER; note = 2'-O-methyladenosine-3'-phosphate
  modified_base 13: mod_base = OTHER; note = 2'-fluorocytidine-3'-phosphate
  modified_base 14: mod_base = OTHER; note = 2'-O-methyladenosine-3'-phosphate
  modified_base 15: mod_base = OTHER; note = 2'-fluorouridine-3'-phosphate
  modified_base 16: mod_base = OTHER; note = 2'-O-methyluridine-3'-phosphate
  modified_base 17: mod_base = OTHER; note = 2'-fluoroguanosine-3'-phosphate
  modified_base 18: mod_base = OTHER; note = 2'-O-methylguanosine-3'-phosphate
  modified_base 19: mod_base = OTHER; note = 2'-fluorouridine-3'-phosphate
  modified_base 20: mod_base = OTHER; note = 2'-O-methylguanosine-3'-phosphate
  modified_base 21: mod_base = OTHER; note = 2'-fluoroadenosine-3'-phosphate attached to N-[tris(N-acetylgalactosamine-alkyl)-amidodecanoyl)]-4-hydr oxyprolinol Hyp-(N-acetylgalactosamine-alkyl)3
tcatcgacaagacattggtga

SEQ ID NO: 4144 - RNA, 21 nt, synthetic construct
  misc_feature 1..21: note = Description of Artificial Sequence: Synthetic oligonucleotide
  source 1..21: mol_type = other RNA
  modified_base 1: mod_base = OTHER; note = 2'-fluorouridine -3'-phosphorothioate
  modified_base 2: mod_base = OTHER; note = 2'-O-methyluridine-3'-phosphorothioate
  modified_base 3: mod_base = OTHER; note = 2'-fluorouridine-3'-phosphate
  modified_base 4: mod_base = OTHER; note = 2'-O-methylcytidine-3'-phosphate
  modified_base 5: mod_base = OTHER; note = 2'-fluoroadenosine-3'-phosphate
  modified_base 6: mod_base = OTHER; note = 2'-O-methyladenosine-3'-phosphate
  modified_base 7: mod_base = OTHER; note = 2'-fluorouridine-3'-phosphate
  modified_base 8: mod_base = OTHER; note = 2'-O-methylguanosine-3'-phosphate
  modified_base 9: mod_base = OTHER; note = 2'-fluoroguanosine-3'-phosphate
  modified_base 10: mod_base = OTHER; note = 2'-fluoroguanosine-3'-phosphate
  modified_base 11: mod_base = OTHER; note = 2'-fluorouridine-3'-phosphate
  modified_base 12: mod_base = OTHER; note = 2'-O-methylguanosine-3'-phosphate
  modified_base 13: mod_base = OTHER; note = 2'-fluorouridine-3'-phosphate
  modified_base 14: mod_base = OTHER; note = 2'-O-methylcytidine-3'-phosphate
  modified_base 15: mod_base = OTHER; note = 2'-fluorocytidine-3'-phosphate
  modified_base 16: mod_base = OTHER; note = 2'-O-methyluridine-3'-phosphate
  modified_base 17: mod_base = OTHER; note = 2'-fluoroadenosine-3'-phosphate
  modified_base 18: mod_base = OTHER; note = 2'-O-methylguanosine-3'-phosphate
  modified_base 19: mod_base = OTHER; note = 2'-fluoroguanosine-3'-phosphate
  modified_base 20: mod_base = OTHER; note = 2'-O-methyladenosine-3'-phosphate
  modified_base 21: mod_base = OTHER; note = 2'-fluoroadenosine-3'-phosphate attached to N-[tris(N-acetylgalactosamine-alkyl)-amidodecanoyl)]-4-hydr oxyprolinol Hyp-(N-acetylgalactosamine-alkyl)3
tttcaatgggtgtcctaggaa

SEQ ID NO: 4145 - RNA, 21 nt, synthetic construct
  misc_feature 1..21: note = Description of Artificial Sequence: Synthetic oligonucleotide
  source 1..21: mol_type = other RNA
  modified_base 1: mod_base = OTHER; note = 2'-fluoroadenosine-3'-phosphorothioate
  modified_base 2: mod_base = OTHER; note = 2'-O-methyladenosine-3'- phosphorothioate
  modified_base 3: mod_base = OTHER; note = 2'-fluorouridine-3'-phosphate
  modified_base 4: mod_base = OTHER; note = 2'-O-methylguanosine-3'-phosphate
  modified_base 5: mod_base = OTHER; note = 2'-fluoroguanosine-3'-phosphate
  modified_base 6: mod_base = OTHER; note = 2'-O-methylguanosine-3'-phosphate
  modified_base 7: mod_base = OTHER; note = 2'-fluorouridine-3'-phosphate
  modified_base 8: mod_base = OTHER; note = 2'-O-methylguanosine-3'-phosphate
  modified_base 9: mod_base = OTHER; note = 2'-fluorouridine-3'-phosphate
  modified_base 10: mod_base = OTHER; note = 2'-fluorocytidine-3'-phosphate
  modified_base 11: mod_base = OTHER; note = 2'-fluorocytidine-3'-phosphate
  modified_base 12: mod_base = OTHER; note = 2'-O-methyluridine-3'-phosphate
  modified_base 13: mod_base = OTHER; note = 2'-fluoroadenosine-3'-phosphate
  modified_base 14: mod_base = OTHER; note = 2'-O-methylguanosine-3'-phosphate
  modified_base 15: mod_base = OTHER; note = 2'-fluoroguanosine-3'-phosphate
  modified_base 16: mod_base = OTHER; note = 2'-O-methyladenosine-3'-phosphate
  modified_base 17: mod_base = OTHER; note = 2'-fluoroadenosine-3'-phosphate
  modified_base 18: mod_base = OTHER; note = 2'-O-methylcytidine-3'-phosphate
  modified_base 19: mod_base = OTHER; note = 2'-fluorocytidine-3'-phosphate
  modified_base 20: mod_base = OTHER; note = 2'-O-methyluridine-3'-phosphate
  modified_base 21: mod_base = OTHER; note = 2'-fluorouridine-3'-phosphate attached to N-[tris(N-acetylgalactosamine-alkyl)-amidodecanoyl)]-4-hydr oxyprolinol Hyp-(N-acetylgalactosamine-alkyl)3
aatgggtgtcctaggaacctt

SEQ ID NO: 4146 - RNA, 21 nt, synthetic construct
  misc_feature 1..21: note = Description of Artificial Sequence: Synthetic oligonucleotide
  source 1..21: mol_type = other RNA
  modified_base 1: mod_base = OTHER; note = 2'-fluoroguanosine-3'-phosphorothioate
  modified_base 2: mod_base = OTHER; note = 2'-O-methyladenosine-3'- phosphorothioate
  modified_base 3: mod_base = OTHER; note = 2'-fluorocytidine-3'-phosphate
  modified_base 4: mod_base = OTHER; note = 2'-O-methyladenosine-3'-phosphate
  modified_base 5: mod_base = OTHER; note = 2'-fluoroguanosine-3'-phosphate
  modified_base 6: mod_base = OTHER; note = 2'-O-methyluridine-3'-phosphate
  modified_base 7: mod_base = OTHER; note = 2'-fluoroguanosine-3'-phosphate
  modified_base 8: mod_base = OTHER; note = 2'-O-methylcytidine-3'-phosphate
  modified_base 9: mod_base = OTHER; note = 2'-fluoroadenosine-3'-phosphate
  modified_base 10: mod_base = OTHER; note = 2'-fluorocytidine-3'-phosphate
  modified_base 11: mod_base = OTHER; note = 2'-fluoroadenosine-3'-phosphate
  modified_base 12: mod_base = OTHER; note = 2'-O-methyladenosine-3'-phosphate
  modified_base 13: mod_base = OTHER; note = 2'-fluorouridine-3'-phosphate
  modified_base 14: mod_base = OTHER; note = 2'-O-methyladenosine-3'-phosphate
  modified_base 15: mod_base = OTHER; note = 2'-fluorouridine-3'-phosphate
  modified_base 16: mod_base = OTHER; note = 2'-O-methyluridine-3'-phosphate
  modified_base 17: mod_base = OTHER; note = 2'-fluorouridine-3'-phosphate
  modified_base 18: mod_base = OTHER; note = 2'-O-methyluridine-3'-phosphate
  modified_base 19: mod_base = OTHER; note = 2'-fluorocytidine-3'-phosphate
  modified_base 20: mod_base = OTHER; note = 2'-O-methylcytidine-3'-phosphate
  modified_base 21: mod_base = OTHER; note = 2'-fluoroadenosine-3'-phosphate attached to N-[tris(N-acetylgalactosamine-alkyl)-amidodecanoyl)]-4-hydr oxyprolinol Hyp-(N-acetylgalactosamine-alkyl)3
gacagtgcacaatattttcca

SEQ ID NO: 4147 - RNA, 21 nt, synthetic construct
  misc_feature 1..21: note = Description of Artificial Sequence: Synthetic oligonucleotide
  source 1..21: mol_type = other RNA
  modified_base 1: mod_base = OTHER; note = 2'-fluoroadenosine-3'-phosphorothioate
  modified_base 2: mod_base = OTHER; note = 2'-O-methylcytidine-3'- phosphorothioate
  modified_base 3: mod_base = OTHER; note = 2'-fluorouridine-3'-phosphate
  modified_base 4: mod_base = OTHER; note = 2'-O-methyluridine-3'-phosphate
  modified_base 5: mod_base = OTHER; note = 2'-fluorouridine-3'-phosphate
  modified_base 6: mod_base = OTHER; note = 2'-O-methyluridine-3'-phosphate
  modified_base 7: mod_base = OTHER; note = 2'-fluorocytidine-3'-phosphate
  modified_base 8: mod_base = OTHER; note = 2'-O-methyladenosine-3'-phosphate
  modified_base 9: mod_base = OTHER; note = 2'-fluoroadenosine-3'-phosphate
  modified_base 10: mod_base = OTHER; note = 2'-fluorouridine-3'-phosphate
  modified_base 11: mod_base = OTHER; note = 2'-fluoroguanosine-3'-phosphate
  modified_base 12: mod_base = OTHER; note = 2'-O-methylguanosine-3'-phosphate
  modified_base 13: mod_base = OTHER; note = 2'-fluoroguanosine-3'-phosphate
  modified_base 14: mod_base = OTHER; note = 2'-O-methyluridine-3'-phosphate
  modified_base 15: mod_base = OTHER; note = 2'-fluoroguanosine-3'-phosphate
  modified_base 16: mod_base = OTHER; note = 2'-O-methyluridine-3'-phosphate
  modified_base 17: mod_base = OTHER; note = 2'-fluorocytidine-3'-phosphate
  modified_base 18: mod_base = OTHER; note = 2'-O-methylcytidine-3'-phosphate
  modified_base 19: mod_base = OTHER; note = 2'-fluorouridine-3'-phosphate
  modified_base 20: mod_base = OTHER; note = 2'-O-methyladenosine-3'-phosphate
  modified_base 21: mod_base = OTHER; note = 2'-fluoroadenosine-3'-phosphate attached to N-[tris(N-acetylgalactosamine-alkyl)-amidodecanoyl)]-4-hydr oxyprolinol Hyp-(N-acetylgalactosamine-alkyl)3
acttttcaatgggtgtcctaa

SEQ ID NO: 4148 - RNA, 21 nt, synthetic construct
  misc_feature 1..21: note = Description of Artificial Sequence: Synthetic oligonucleotide
  source 1..21: mol_type = other RNA
  modified_base 1: mod_base = OTHER; note = 2'-fluoroadenosine-3'-phosphorothioate
  modified_base 2: mod_base = OTHER; note = 2'-O-methyladenosine-3'- phosphorothioate
  modified_base 3: mod_base = OTHER; note = 2'-fluoroguanosine-3'-phosphate
  modified_base 4: mod_base = OTHER; note = 2'-O-methyluridine-3'-phosphate
  modified_base 5: mod_base = OTHER; note = 2'-fluorocytidine-3'-phosphate
  modified_base 6: mod_base = OTHER; note = 2'-O-methyladenosine-3'-phosphate
  modified_base 7: mod_base = OTHER; note = 2'-fluorouridine-3'-phosphate
  modified_base 8: mod_base = OTHER; note = 2'-O-methylcytidine-3'-phosphate
  modified_base 9: mod_base = OTHER; note = 2'-fluoroguanosine-3'-phosphate
  modified_base 10: mod_base = OTHER; note = 2'-fluoroadenosine-3'-phosphate
  modified_base 11: mod_base = OTHER; note = 2'-fluorocytidine-3'-phosphate
  modified_base 12: mod_base = OTHER; note = 2'-O-methyladenosine-3'-phosphate
  modified_base 13: mod_base = OTHER; note = 2'-fluoroadenosine-3'-phosphate
  modified_base 14: mod_base = OTHER; note = 2'-O-methylguanosine-3'-phosphate
  modified_base 15: mod_base = OTHER; note = 2'-fluoroadenosine-3'-phosphate
  modified_base 16: mod_base = OTHER; note = 2'-O-methylcytidine-3'-phosphate
  modified_base 17: mod_base = OTHER; note = 2'-fluoroadenosine-3'-phosphate
  modified_base 18: mod_base = OTHER; note = 2'-O-methyluridine-3'-phosphate
  modified_base 19: mod_base = OTHER; note = 2'-fluorouridine-3'-phosphate
  modified_base 20: mod_base = OTHER; note = 2'-O-methylguanosine-3'-phosphate
  modified_base 21: mod_base = OTHER; note = 2'-fluoroadenosine-3'-phosphate attached to N-[tris(N-acetylgalactosamine-alkyl)-amidodecanoyl)]-4-hydr oxyprolinol Hyp-(N-acetylgalactosamine-alkyl)3
aagtcatcgacaagacattga

SEQ ID NO: 4149 - RNA, 21 nt, synthetic construct
  misc_feature 1..21: note = Description of Artificial Sequence: Synthetic oligonucleotide
  source 1..21: mol_type = other RNA
  modified_base 1: mod_base = OTHER; note = 2'-fluoroadenosine-3'-phosphorothioate
  modified_base 2: mod_base = OTHER; note = 2'-O-methyluridine-3'-phosphorothioate
  modified_base 3: mod_base = OTHER; note = 2'-fluorocytidine-3'-phosphate
  modified_base 4: mod_base = OTHER; note = 2'-O-methylguanosine-3'-phosphate
  modified_base 5: mod_base = OTHER; note = 2'-fluoroadenosine-3'-phosphate
  modified_base 6: mod_base = OTHER; note = 2'-O-methylcytidine-3'-phosphate
  modified_base 7: mod_base = OTHER; note = 2'-fluoroadenosine-3'-phosphate
  modified_base 8: mod_base = OTHER; note = 2'-O-methyladenosine-3'-phosphate
  modified_base 9: mod_base = OTHER; note = 2'-fluoroguanosine-3'-phosphate
  modified_base 10: mod_base = OTHER; note = 2'-fluoroadenosine-3'-phosphate
  modified_base 11: mod_base = OTHER; note = 2'-fluorocytidine-3'-phosphate
  modified_base 12: mod_base = OTHER; note = 2'-O-methyladenosine-3'-phosphate
  modified_base 13: mod_base = OTHER; note = 2'-fluorouridine-3'-phosphate
  modified_base 14: mod_base = OTHER; note = 2'-O-methyluridine-3'-phosphate
  modified_base 15: mod_base = OTHER; note = 2'-fluoroguanosine-3'-phosphate
  modified_base 16: mod_base = OTHER; note = 2'-O-methylguanosine-3'-phosphate
  modified_base 17: mod_base = OTHER; note = 2'-fluorouridine-3'-phosphate
  modified_base 18: mod_base = OTHER; note = 2'-O-methylguanosine-3'-phosphate
  modified_base 19: mod_base = OTHER; note = 2'-fluoroadenosine-3'-phosphate
  modified_base 20: mod_base = OTHER; note = 2'-O-methylguanosine-3'-phosphate
  modified_base 21: mod_base = OTHER; note = 2'-fluoroadenosine-3'-phosphate attached to N-[tris(N-acetylgalactosamine-alkyl)-amidodecanoyl)]-4-hydr oxyprolinol Hyp-(N-acetylgalactosamine-alkyl)3
atcgacaagacattggtgaga

SEQ ID NO: 4150 - RNA, 21 nt, synthetic construct
  misc_feature 1..21: note = Description of Artificial Sequence: Synthetic oligonucleotide
  source 1..21: mol_type = other RNA
  modified_base 1: mod_base = OTHER; note = 2'-fluoroguanosine-3'-phosphorothioate
  modified_base 2: mod_base = OTHER; note = 2'-O-methylguanosine-3'- phosphorothioate
  modified_base 3: mod_base = OTHER; note = 2'-fluoroguanosine-3'-phosphate
  modified_base 4: mod_base = OTHER; note = 2'-O-methyladenosine-3'-phosphate
  modified_base 5: mod_base = OTHER; note = 2'-fluoroguanosine-3'-phosphate
  modified_base 6: mod_base = OTHER; note = 2'-O-methyladenosine-3'-phosphate
  modified_base 7: mod_base = OTHER; note = 2'-fluoroadenosine-3'-phosphate
  modified_base 8: mod_base = OTHER; note = 2'-O-methyladenosine-3'-phosphate
  modified_base 9: mod_base = OTHER; note = 2'-fluoroguanosine-3'-phosphate
  modified_base 10: mod_base = OTHER; note = 2'-fluoroguanosine-3'-phosphate
  modified_base 11: mod_base = OTHER; note = 2'-fluorouridine-3'-phosphate
  modified_base 12: mod_base = OTHER; note = 2'-O-methylguanosine-3'-phosphate
  modified_base 13: mod_base = OTHER; note = 2'-fluorouridine-3'-phosphate
  modified_base 14: mod_base = OTHER; note = 2'-O-methyluridine-3'-phosphate
  modified_base 15: mod_base = OTHER; note = 2'-fluorocytidine-3'-phosphate
  modified_base 16: mod_base = OTHER; note = 2'-O-methyladenosine-3'-phosphate
  modified_base 17: mod_base = OTHER; note = 2'-fluoroadenosine-3'-phosphate
  modified_base 18: mod_base = OTHER; note = 2'-O-methylguanosine-3'-phosphate
  modified_base 19: mod_base = OTHER; note = 2'-fluoroadenosine-3'-phosphate
  modified_base 20: mod_base = OTHER; note = 2'-O-methyluridine-3'-phosphate
  modified_base 21: mod_base = OTHER; note = 2'-fluoroadenosine-3'-phosphate attached to N-[tris(N-acetylgalactosamine-alkyl)-amidodecanoyl)]-4-hydr oxyprolinol Hyp-(N-acetylgalactosamine-alkyl)3
gggagaaaggtgttcaagata
